(19) United States
(12) Patent Application Publication
(10) Pub. No.: US 2025/0034225 A1
(43) Pub. Date: Jan. 30, 2025

(54) LONG ACTING GLUCAGON LIKE POLYPEPTIDE-1 (GLP-1) RECEPTOR AGONISTS AND METHODS OF USE

(71) Applicant: I2O Therapeutics, Inc., Cambridge, MA (US)

(72) Inventors: William Blackwell, Boston, MA (US); Ved P. Srivastava, Boston, MA (US); Mark Paulik, Boston, MA (US)

(21) Appl. No.: 18/779,857

(22) Filed: Jul. 22, 2024

Related U.S. Application Data
(62) Division of application No. 17/553,381, filed on Dec. 16, 2021, now Pat. No. 12,084,485.
(60) Provisional application No. 63/126,736, filed on Dec. 17, 2020.

(51) Int. Cl. C07K 14/605; A61K 9/00; A61K 38/26; A61P 1/16; A61P 3/04

(52) U.S. Cl. CPC C07K 14/605; A61K 9/0004; A61K 38/26; A61P 1/16; A61P 3/04

(57) ABSTRACT

This invention relates to isolated polypeptides that are long acting analogs of human GLP-1. The disclosed GLP-1 receptor agonist polypeptides have beneficial physicochemical properties relative to endogenous GLP-1 and known synthetic GLP-1 receptor agonist polypeptides, such as longer (i.e., “long-acting”) elimination half-lives (t_{1/2}), and improved solubility and thermal stability. This invention also relates to methods of using presently disclosed GLP-1 receptor agonist polypeptides in a variety of therapeutic indications, as well as methods of producing the same. The disclosed GLP-1 receptor agonist polypeptides are particularly useful in methods of treating metabolic diseases or disorders, such as type 2 diabetes, treating obesity, and providing weight loss, and in methods of treating nonalcoholic fatty liver disease (NAFLD) and/or nonalcoholic steatohepatitis (NASH).

### CROSS-REFERENCE TO RELATED APPLICATIONS

[0001] This application is a divisional of U.S. patent application Ser. No. 17/553,381, filed on Dec. 16, 2021, which application claims the benefit of U.S. Ser. No. 63/126,736, filed Dec. 17, 2020, the disclosures of which are incorporated herein by reference in their entirety.

### SEQUENCE LISTING

[0002] The instant application contains a Sequence Listing which has been submitted electronically and is hereby incorporated by reference in its entirety. Said XML copy, created on Oct. 14, 2024, is named 756388_IOT-056DV_SL and is 2,495,878 bytes in size.

### FIELD

[0003] The present invention relates to compounds that are glucagon like polypeptide-1 (GLP-1) receptor agonists and methods of preparing the same. The invention also provides pharmaceutically acceptable compositions comprising compounds of the present invention and methods of using said compositions in the treatment of various disorders.

### BACKGROUND

[0004] Endogenous GLP-1 is released from the gut in response to nutrient ingestion. Following food intake and digestion, carbohydrates and fats appear in the lumen of the gut, which stimulate a so-called incretin effect, the release of incretins such as GLP-1 from intestinal L-cells. GLP-1, once released, targets the pancreas where it enhances secretion of insulin in a “glucose dependent manner.” In other words, this GLP-1-mediated effect upon insulin persists when glucose levels are high yet safely dissipates as glucose levels fall. GLP-1 activity thus self-regulates to reduce the risk of hypoglycemia (the condition by which glucose levels drop dangerously low). Since GLP-1 has a short elimination half-life (t_{1/2}) of less than five minutes, this endogenous peptide is unsuitably short-lived for use as a therapeutic.

[0005] Synthetic analogs of GLP-1 have been designed to have longer half-lives and similarly enhance secretion of insulin in a glucose dependent manner like endogenous GLP-1, for use in the treatment of type 2 diabetes and for providing weight loss.

[0006] Certain GLP-1 receptor agonists, including Bydureon® (exenatide), marketed by AstraZeneca of Cambridge, U.K.; Trulicity® (dulaglutide), marketed by Eli Lilly and Co., of Indianapolis, IN, U.S.A.; and Victoza® (liraglutide), Ozempic® (injectable semaglutide) & Rybelsus® (orally administered semaglutide), marketed by Novo Nordisk A/S of Bagsværd, Denmark, have each been approved by numerous regulatory authorities, including the United States Food and Drug Administration (U.S. FDA) and European Medicines Agency (EMA) for the treatment of patients suffering from type 2 diabetes. These marketed GLP-1 receptor agonists were developed and formulated for injectable and/or oral administration to patients. However, patient adherence to injectable and orally administered therapies for type 2 diabetes is notoriously poor which prohibits many patients from realizing a full and lasting therapeutic potential of GLP-1 receptor agonists. Many patients skip or cease periodic self-administrations of prescribed injectable and orally administered GLP-1 receptor agonists and thus fail to adequately treat and control their own type 2 diabetic condition.

[0007] Accordingly, there remains a need for improved GLP-1 receptor agonist polypeptides with high potencies against the GLP-1 receptor, having excellent physicochemical properties, and that are tailored for delivery to patients via more reliable modes of administration than injectable and orally administered therapies.

### SUMMARY

[0008] It has now been found that compounds of this invention, and pharmaceutically acceptable compositions thereof, are effective as GLP-1 receptor agonists. Such compounds have a general formula as follows:

[0009] An isolated polypeptide, comprising the amino acid sequence of SEQ ID NO: 200:

(SEQ ID NO: 200)
HX₂X₃GTX₆X₇X₈X₉X₁₀SX₁₂X₁₃X₁₄EX₁₆X₁₇X₁₈X₁₉X₂₀X₂₁
FIX₂₄WLKX₂₈GGPX₃₂SGAPPPS-(OH/NH₂);

[0010] wherein each variable is as defined and described herein.

[0011] Compounds of the present invention have been designed to attain long elimination half-lives (t_{1/2}) and are thus described herein as “long-acting” GLP-1 receptor agonists.

[0012] Compounds of the present invention, and pharmaceutically acceptable compositions thereof, are useful for treating a variety of diseases, disorders or conditions, associated with the GLP-1 receptor. Such diseases, disorders, or conditions include metabolic diseases or disorders such as type 2 diabetes, obesity and the need to attain weight loss. In certain embodiments, the invention also relates to methods of treating nonalcoholic fatty liver disease (NAFLD) and/or nonalcoholic steatohepatitis (NASH).

### BRIEF DESCRIPTION OF THE DRAWINGS

[0013] FIG. 1 depicts chronic weight loss (Day 27) in Long Evans (LE) diet-induced obese (DIO) rats treated with exemplary long acting GLP-1 analog polypeptides.

[0014] FIG. 2A illustrates comparative in vivo weight loss potencies in DIO rats for compound A120 vs semaglutide (% baseline vs vehicle over 28 days, n=6/dose). Ozempic® (semaglutide, Novo Nordisk A/S of Bagsværd, Demark) has been approved by the U.S. FDA for the treatment of type 2 diabetes.

[0015] FIG. 2B illustrates comparative in vivo type 2 diabetic potencies (i.e., HbA1c lowering) in DIO rats for compound A120 vs semaglutide (A-HbA1c vs vehicle over 28 days, n=9/dose). Antidiabetic potencies were compared against a ZDF rat model for type 2 diabetes.

[0016] FIG. 3 depicts a cross-sectional diagram of a representative osmotic mini-pump for drug delivery.

[0017] FIG. 4 depicts the potency shift of conjugated GLP-1 receptor agonists by human serum albumin (HSA) binding.

[0018] FIG. 5 depicts the change in plasma concentration of compound A120 in rats and monkeys following intravenous and subcutaneous administration.

[0019] FIG. 6 depicts dose and concentration response of body weight loss in male Long Evans (LE) Diet Induced Obesity (DIO) rats treated with compound A120 for 27 days. Male LE DIO rats at 18 weeks of age (14 weeks on high fat diet) were dosed (SC; every other day) with six doses of compound A120 ranging from 1 to 300 mcg/kg/day (n=6 animals/dose). Shaded and open circles represent replicate doses (3, 30, 300 mcg/kg/day) of semaglutide from two separate studies.

[0020] FIG. 7 depicts semaglutide- and A120-induced weight loss in male LE DIO rats over a 27-day period.

[0021] FIG. 8 depicts semaglutide- and A120-induced changes in body composition in male LE DIO rats, highlighting the fact that changes in body composition were primarily due to fat mass loss (body composition was determined on day 26 using quantitative magnetic resonance).

[0022] FIG. 9 depicts average daily food intake inhibition and cumulative food intake of mice administered varying doses of compound A120 or semaglutide.

[0023] FIG. 10 depicts the reduction in body weight of male Zucker Diabetic Fatty (ZDF) rats dosed (SC injection; every other day) with compound A120 or semaglutide.

[0024] FIG. 11 depicts semaglutide- and A120-induced changes in body composition in male ZDF rats, highlighting the fact that changes in body composition were primarily due to fat mass loss (body composition was determined on day 25).

### DETAILED DESCRIPTION

[0025] General description of certain embodiments of the invention Compounds of the present invention, and pharmaceutical compositions thereof, are useful as agonists of the GLP-1 receptor, particularly as agonists of the human GLP-1 receptor. This invention also relates to methods of producing and using such compounds, i.e., GLP-1 receptor agonist polypeptides. Compounds of the present invention are long-acting GLP-1 receptor agonists. These GLP-1 receptor agonist polypeptides are particularly useful in methods of treating metabolic diseases or disorders, such as type 2 diabetes, obesity, and in methods of providing weight loss. In certain embodiments, the invention also relates to methods of treating nonalcoholic fatty liver disease (NAFLD) and/or nonalcoholic steatohepatitis (NASH).

[0026] In certain embodiments, the present invention provides an isolated polypeptide, comprising the amino acid sequence of SEQ ID NO: 200: HX₂X₃GTX₆X₇X₈X₉X₁₀SX₁₂X₁₃X₁₄EX₁₆X₁₇X₁₈X₁₉X₂₀X₂₁FIX₂₄WLKX₂₈GGPX₃₂SGAPPPS-(OH/NH₂) (SEQ ID NO: 200) or a pharmaceutically acceptable salt thereof, wherein:
[0027] X₂ is A, 2-aminoisobutyric acid (Aib), or G;
[0028] X₃ is E or N-methyl Glu;
[0029] X₆ is F or Y;
[0030] X₇ is S or T;
[0031] X₈ is diaminopimelic acid (Dap), E, K, N, N-methyl Ser, Q, S, s, or Y;
[0032] X₉ is D or E;
[0033] X₁₀ is I, L, N-methyl Leu, or V;
[0034] X₁₂ is E, K, Q, or S;
[0035] X₁₃ is Aib, E, K, Q, S, W, or Y;
[0036] X₁₄ is E, R, I, K, L, M, Q, or Y;
[0037] X₁₆ is 2,4-diaminobutanoic acid (Dab), Dap, E, K, k, or ornithine (Orn);
[0038] X₁₇ is E, K, or Q;
[0039] X₁₈ is A, K, S, or Y;
[0040] X₁₉ is A, K, or V;
[0041] X₂₀ is E, K, or R;
[0042] X₂₁ is Aib, E, H, K, L, Q, or Y;
[0043] X₂₄ is A, Aib, E, K, Q, S, or Y;
[0044] X₂₈ is D, E, K, N, Q, S, or Y; and
[0045] X₃₂ is Dap, H, K, R, or S;
[0046] wherein when X₁₆ is Dab, Dap, K, k, or Orn, it is covalently bound to a lipophilic substituent, optionally via a spacer;
[0047] wherein when X₁₆ is E, at least one of X₁₄, X₁₇, X₁₈, X₁₉, X₂₀, or X₂₁ is selected to be lysine
[0048] wherein the lysine residue is covalently bound to a lipophilic substituent, optionally via a spacer; and
[0049] wherein the isolated polypeptide optionally further comprises two amino acid residues having side chains that are covalently joined to form a bridging moiety.

[0050] In some embodiments, the bridging moiety is a lactam bridging moiety. For example, in some embodiments, the isolated polypeptide optionally further comprises two amino acid residues, wherein one is lysine and the other is glutamic acid, and the amino-containing sidechain of lysine and the carboxy-containing sidechain of glutamic acid are covalently joined, with loss of water, to form a lactam bridging moiety. In some embodiments, the lactam bridging moiety is formed via covalent bonds between side chains of a lysine and a glutamic acid at positions X₁₇ and X₂₁, respectively; at positions X₂₁ and X₁₇, respectively; at positions X₂₁ and X₂₈, respectively; at positions X₂₈ and X₂₁, respectively; at positions X₂₀ and X₂₄, respectively; at positions X₂₄ and X₂₀, respectively; or at positions X₁₂ and X₁₆, respectively.

[0051] In one embodiment, the isolated polypeptide is not an analogue of exenatide, HGEGTFTSDLSKQMEEEAVRLFIEWLKNGGPSSGAPPPS-NH₂ (SEQ ID NO: 300), having K₁₂ or K₂₇ covalently bound to a lipophilic substituent, optionally via a spacer.

[0052] In some embodiments, X₂ is Aib.

[0053] In some embodiments, if X₂₄ is S, then X₁₀ is V.

[0054] In some embodiments, X₁₄ is Y.

[0055] In some embodiments, X₁₄ is M, and X₁₆ is K covalently bound to a lipophilic substituent, optionally via a spacer.

[0056] In some embodiments, X₁₆ is lysine covalently bound to a lipophilic substituent, optionally via a spacer.

[0057] In some embodiments, if X₁₆ is E, then X₂₁ is K or E. In some embodiments, if X₁₆ is E, then X₂₁ is K. In some embodiments, if X₁₆ is E, then X₂₁ is E.

[0058] In some embodiments, the peptide further comprises a lactam bridge formed via an amide bond between the side chains of a lysine and a glutamic acid at positions X₂₀ and X₂₄, respectively.

### Definitions

[0059] It is to be understood that the terminology used herein is for the purpose of describing particular embodiments only, and is not intended to be limiting. As used in this specification and the appended claims, the singular forms “a,” “an” and “the” include plural referents unless the context clearly dictates otherwise. Thus, for example, reference to “a solvent” includes a combination of two or more such solvents, reference to “a peptide” includes one or more peptides, or mixtures of peptides, reference to “a drug” includes one or more drugs, reference to “an osmotic delivery device” includes one or more osmotic delivery devices, and the like. Unless specifically stated or obvious from context, as used herein, the term “or” is understood to be inclusive and covers both “or” and “and”.

[0060] Unless specifically stated or obvious from context, as used herein, the term “about” is understood as within a range of normal tolerance in the art, for example within 2 standard deviations of the mean. About can be understood as within 10%, 9%, 8%, 7%, 6%, 5%, 4%, 3%, 2%, 1%, 0.5%, 0.1%, 0.05%, or 0.01% of the stated value. Unless otherwise clear from the context, all numerical values provided herein are modified by the term “about.”

[0061] Unless specifically stated or obvious from context, as used herein, the term “substantially” is understood as within a narrow range of variation or otherwise normal tolerance in the art. Substantially can be understood as within 5%, 4%, 3%, 2%, 1%, 0.5%, 0.1%, 0.05%, 0.01% or 0.001% of the stated value.

[0062] Unless defined otherwise, all technical and scientific terms used herein have the same meaning as commonly understood by one of ordinary skill in the art to which the invention pertains. Although other methods and materials similar, or equivalent, to those described herein can be used in the practice of the present invention, the preferred materials and methods are described herein.

[0063] In describing and claiming the present invention, the following terminology will be used in accordance with the definitions set out below.

[0064] The terms “drug,” “therapeutic agent,” and “beneficial agent” are used interchangeably to refer to any therapeutically active substance that is delivered to a subject to produce a desired beneficial effect. In one embodiment of the present invention, the drug is a polypeptide. In another embodiment of the present invention, the drug is a small molecule, for example, hormones such as androgens or estrogens. The devices and methods of the present invention are well suited for the delivery of proteins, small molecules and combinations thereof.

[0065] The terms “peptide,” “polypeptide,” and “protein” are used interchangeably herein and typically refer to a molecule comprising a chain of two or more amino acids (e.g., most typically L-amino acids, but also including, e.g., D-amino acids, modified amino acids, amino acid analogs, and amino acid mimetics).

[0066] In some embodiments, naturally-occurring L-amino acids, are represented by either conventional three-letter, or capitalized one-letter, amino acid designations of Table 1. In other embodiments, naturally-occurring L-amino acids and D-amino acids, are both represented by either conventional three-letter, or capitalized one-letter, amino acid designations of Table 1. In still other embodiments, D-amino acids, are represented by lower-case one-letter amino acid designations corresponding to one-letter designations of Table 2, i.e., a, l, m, f, w, k, q, e, s, p, v, i, c, y, h, r, n, d, and t.

TABLE 1
Naturally-occurring amino acids

| | | | | | |
|---|---|---|---|---|---|
| G | Glycine | Gly | P | Proline | Pro |
| A | Alanine | Ala | V | Valine | Val |
| L | Leucine | Leu | I | Isoleucine | Ile |
| M | Methionine | Met | C | Cysteine | Cys |
| F | Phenylalanine | Phe | Y | Tyrosine | Tyr |
| W | Tryptophan | Trp | H | Histidine | His |
| K | Lysine | Lys | R | Arginine | Arg |
| Q | Glutamine | Gln | N | Asparagine | Asn |
| E | Glutamic Acid | Glu | D | Aspartic Acid | Asp |
| S | Serine | Ser | T | Threonine | Thr |

TABLE 2
Lower case designations refer to
D stereoisomers of amino acids

| | | | | | |
|---|---|---|---|---|---|
| | | | p | Proline | D-Pro |
| a | D-Alanine | D-Ala | v | D-Valine | D-Val |
| l | D-Leucine | D-Leu | i | D-Isoleucine | D-Ile |
| m | D-Methionine | D-Met | c | D-Cysteine | D-Cys |
| f | D-Phenylalanine | D-Phe | y | D-Tyrosine | D-Tyr |
| w | D-Tryptophan | D-Trp | h | D-Histidine | D-His |
| k | D-Lysine | D-Lys | r | D-Arginine | D-Arg |
| q | D-Glutamine | D-Gln | n | D-Asparagine | D-Asn |
| e | D-Glutamic Acid | D-Glu | d | D-Aspartic Acid | D-Asp |
| s | D-Serine | D-Ser | t | D-Threonine | D-Thr |

[0067] Peptides may be naturally occurring, synthetically produced, or recombinantly expressed. Peptides may also comprise additional groups modifying the amino acid chain, for example, functional groups added via post-translational modification. Examples of post-translation modifications include, but are not limited to, acetylation, alkylation (including, methylation), biotinylation, glutamylation, glycylation, glycosylation, isoprenylation, lipoylation, phosphopantetheinylation, phosphorylation, selenation, and C-terminal amidation. The term peptide also includes peptides comprising modifications of the amino terminus and/or the carboxy terminus. Modifications of the terminal amino group include, but are not limited to, des-amino, N-lower alkyl, N-di-lower alkyl, and N-acyl modifications. Modifications of the terminal carboxy group include, but are not limited to, amide, lower alkyl amide, dialkyl amide, and lower alkyl ester modifications (e.g., wherein lower alkyl is C₁-C₄ alkyl). The term peptide also includes modifications, such as but not limited to those described above, of amino acids falling between the amino and carboxy termini. In one embodiment, a peptide may be modified by addition of a small-molecule drug.

[0068] The terminal amino acid at one end of the peptide chain typically has a free amino group (i.e., the amino terminus). The terminal amino acid at the other end of the chain typically has a free carboxyl group (i.e., the carboxy terminus). Typically, the amino acids making up a peptide are numbered in order, starting at the amino terminus and increasing in the direction of the carboxy terminus of the peptide.

[0069] The phrase “amino acid residue” as used herein refers to an amino acid that is incorporated into a peptide by an amide bond or an amide bond mimetic.

[0070] The term “insulinotropic” as used herein typically refers to the ability of a compound, e.g., a peptide, to stimulate or affect the production and/or activity of insulin (e.g., an insulinotropic hormone). Such compounds typically stimulate or otherwise affect the secretion or biosynthesis of insulin in a subject. Thus, an “insulinotropic peptide” is an amino acid-containing molecule capable of stimulating or otherwise affecting secretion or biosynthesis of insulin.

[0071] The term “insulinotropic peptide” as used herein includes, but is not limited to, glucagon-like peptide 1 (GLP-1), as well as derivatives and analogues thereof, GLP-1 receptor agonists, such as exenatide, exenatide having the amino acid sequence of SEQ ID NO: 300, as well as derivatives and analogues thereof.

[0072] The term “acylated” as used herein, in relation to disclosed polypeptides, means the disclosed polypeptide is substituted with one or more lipophilic substituents each optionally via a spacer, wherein “lipophilic substituent” and “spacer” are defined herein. Certain lipophilic substituents, each optionally via a spacer, can bind albumin and confer affinity to albumin to the resulting acylated polypeptide. The extent is variable, and depending on numerous factors, to which lipophilic substituents, each optionally via a spacer, bind albumin and confer affinity to albumin to the resulting acylated polypeptide. Numerous factors include identities of the lipophilic substituent, optional spacer, polypeptide, and the site of covalent attachment to the polypeptide.

[0073] The terms “linear” or “liner polypeptide” as used herein, refer to a “non-acylated” polypeptide, in other words, a disclosed GLP-1 receptor agonist polypeptide without a lipophilic substituents each optionally via a spacer, wherein “lipophilic substituent” and “spacer” are defined herein.

[0074] The terms “conjugated” or conjugated polypeptide” as used herein, refer to an “acylated” polypeptide, in other words, a disclosed GLP-1 receptor agonist polypeptide having one or more lipophilic substituents each optionally via a spacer, wherein “lipophilic substituent” and “spacer” are defined herein.

[0075] As used herein, the term “pharmaceutically acceptable salts” refers to derivatives of the disclosed polypeptides wherein the parent polypeptide is modified by converting an existing acid or base moiety to its salt form. Lists of suitable salts are found in Remington's Pharmaceutical Sciences, 17th ed., Mack Publishing Company, Easton, Pa., 1985, p. 1418 and Journal of Pharmaceutical Science, 66, 2 (1977), each of which is incorporated herein by reference in its entirety.

[0076] The term “vehicle” as used herein refers to a medium used to carry a compound, e.g., a drug or a particle containing a drug. Vehicles of the present invention typically comprise components such as polymers and solvents. The suspension vehicles of the present invention typically comprise solvents and polymers that are used to prepare suspension formulations further comprising drug particle formulations.

[0077] The phrase “phase separation” as used herein refers to the formation of multiple phases (e.g., liquid and gel phases) in the suspension vehicle, such as when the suspension vehicle contacts the aqueous environment. In some embodiments of the present invention, the suspension vehicle is formulated to exhibit phase separation upon contact with an aqueous environment having less than approximately 10% water.

[0078] The phrase “single-phase” as used herein refers to a solid, semisolid, or liquid homogeneous system that is physically and chemically uniform throughout.

[0079] The term “dispersed” as used herein refers to dissolving, dispersing, suspending, or otherwise distributing a compound, for example, a drug particle formulation, in a suspension vehicle.

[0080] The phrase “chemically stable” as used herein refers to formation in a formulation of an acceptable percentage of degradation products produced over a defined period of time by chemical pathways, such as deamidation (usually by hydrolysis), aggregation, or oxidation.

[0081] The phrase “physically stable” as used herein refers to formation in a formulation of an acceptable percentage of aggregates (e.g., dimers and other higher molecular weight products).

[0082] Further, a physically stable formulation does not change its physical state as, for example, from liquid to solid, or from amorphous to crystal form.

[0083] The term “viscosity” as used herein typically refers to a value determined from the ratio of shear stress to shear rate (see, e.g., Considine, D. M. & Considine, G. D., Encyclopedia of Chemistry, 4th Edition, Van Nostrand, Reinhold, N.Y., 1984) essentially as follows:

F/A=μ*V/L (Equation 1)
[0084] where F/A=shear stress (force per unit area),
[0085] μ=a proportionality constant (viscosity), and
[0086] V/L=the velocity per layer thickness (shear rate).

[0087] From this relationship, the ratio of shear stress to shear rate defines viscosity. Measurements of shear stress and shear rate are typically determined using parallel plate rheometry performed under selected conditions (for example, a temperature of about 37° C.). Other methods for the determination of viscosity include, measurement of a kinematic viscosity using viscometers, for example, a Cannon-Fenske viscometer, an Ubbelohde viscometer for the Cannon-Fenske opaque solution, or a Ostwald viscometer. Generally, suspension vehicles of the present invention have a viscosity sufficient to prevent a particle formulation suspended therein from settling during storage and use in a method of delivery, for example, in an implantable, drug delivery device.

[0088] The term “non-aqueous” as used herein refers to an overall moisture content, for example, of a suspension formulation, typically of less than or equal to about 10 wt %, for example, less than or equal to about 7 wt %, less than or equal to about 5 wt %, and/or less than about 4 wt %. Also, a particle formulation of the present invention comprises less than about 10 wt %, for example, less than about 5 wt %, residual moisture.

[0089] The term “subject” as used herein refers to any member of the subphylum Chordata, including, without limitation, humans and other primates, including non-human primates such as rhesus macaques and other monkey species and chimpanzees and other ape species; farm animals such as cattle, sheep, pigs, goats and horses; domestic mammals such as dogs and cats; laboratory animals including rodents such as mice, rats and guinea pigs; birds, including domestic, wild and game birds such as chickens, turkeys and other gallinaceous birds, ducks, geese, and the like. The term does not denote a particular age or gender. Thus, both adult and newborn individuals are intended to be covered.

[0090] As used herein, the terms “treatment,” “treat,” and “treating” refer to reversing, alleviating, delaying the onset of, or inhibiting the progress of a disease or disorder, or one or more symptoms thereof, as described herein. In some embodiments, treatment may be administered after one or more symptoms have developed. In other embodiments, treatment may be administered in the absence of symptoms. For example, treatment may be administered to a susceptible individual prior to the onset of symptoms (e.g., in light of a history of symptoms and/or in light of genetic or other susceptibility factors). Treatment may also be continued after symptoms have resolved, for example to prevent or delay their recurrence.

[0091] The term “osmotic delivery device” as used herein typically refers to a device used for delivery of a drug (e.g., a disclosed GLP-1 receptor agonist polypeptide) to a subject, wherein the device comprises, for example, a reservoir (made, e.g., from a titanium alloy) having a lumen that contains a suspension formulation comprising a drug (e.g., a disclosed GLP-1 receptor agonist polypeptide) and an osmotic agent formulation. A piston assembly positioned in the lumen isolates the suspension formulation from the osmotic agent formulation. A semi-permeable membrane is positioned at a first distal end of the reservoir adjacent the osmotic agent formulation and a diffusion moderator (which defines a delivery orifice through which the suspension formulation exits the device) is positioned at a second distal end of the reservoir adjacent the suspension formulation. Typically, the osmotic delivery device is implanted within the subject, for example, subdermally or subcutaneously (e.g., in the inside, outside, or back of the upper arm and in the abdominal area). An exemplary osmotic delivery device is the DUROS® (ALZA Corporation, Mountain View, Calif) delivery device. Examples of terms synonymous to “osmotic delivery device” include but are not limited to “osmotic drug delivery device”, “osmotic drug delivery system”, “osmotic device”, “osmotic delivery device”, “osmotic delivery system”, “osmotic pump”, “implantable drug delivery device”, “drug delivery system”, “drug delivery device”, “implantable osmotic pump”, “implantable drug delivery system”, and “implantable delivery system”. Other terms for “osmotic delivery device” are known in the art.

[0092] The term “continuous delivery” as used herein typically refers to a substantially continuous release of drug from an osmotic delivery device and into tissues near the implantation site, e.g., subdermal and subcutaneous tissues. For example, an osmotic delivery device releases drug essentially at a predetermined rate based on the principle of osmosis. Extracellular fluid enters the osmotic delivery device through the semi-permeable membrane directly into the osmotic engine that expands to drive the piston at a slow and consistent rate of travel. Movement of the piston forces the drug formulation to be released through the orifice of the diffusion moderator. Thus, release of the drug from the osmotic delivery device is at a slow, controlled, consistent rate.

[0093] The term “substantial steady-state delivery” as used herein typically refers to delivery of a drug at or near a target concentration over a defined period of time, wherein the amount of the drug being delivered from an osmotic delivery device is substantially zero-order delivery. Substantial zero-order delivery of an active agent (e.g., a disclosed GLP-1 receptor agonist polypeptide) means that the rate of drug delivered is constant and is independent of the drug available in the delivery system; for example, for zero-order delivery, if the rate of drug delivered is graphed against time and a line is fitted to the data the line has a slope of approximately zero, as determined by standard methods (e.g., linear regression).

[0094] The phrase “drug half-life” as used herein refers how long it takes a drug to be eliminated from blood plasma by one half of its concentration. A drug's half-life is usually measured by monitoring how a drug degrades when it is administered via injection or intravenously. A drug is usually detected using, for example, a radioimmunoassay (RIA), a chromatographic method, an electrochemiluminescent (ECL) assay, an enzyme linked immunosorbent assay (ELISA) or an immunoenzymatic sandwich assay (IEMA).

[0095] The terms “μg” and “mcg” and “ug” are understood to mean “micrograms”. Similarly, the terms “μl” and “uL” are understood to mean “microliter”, and the terms “μM” and “uM” are understood to mean “micromolar”.

[0096] The term “serum” is meant to mean any blood product from which a substance can be detected. Thus, the term serum includes at least whole blood, serum, and plasma. For example, “an amount of [a substance] in a subject's serum” would cover “an amount of [the substance] in a subject's plasma”.

[0097] Baseline is defined as the last assessment on or before the day of the initial placement of an osmotic delivery device (containing drug or placebo).

### Endogenous GLP-1, GLP-1 Receptors, and Certain GPL-1 Analogs

[0098] The phrase “incretin mimetics” as used herein includes, but is not limited to GLP-1 peptide, GLP-1 (7-36), GLP-1 receptor agonists, peptide derivatives of GLP-1, peptide analogs of GLP-1, exenatide, exenatide having the amino acid sequence of exendin-4 (the naturally-occurring form of exenatide, exenatide-LAR, lixisenatide, liraglutide, semaglutide, dulaglutide, albiglutide, and taspoglutide. Incretin mimetics are also referred to herein as “insulinotropic peptides.” Incretin mimetics which target the GLP-1 receptor are also known in the literature as “GLP-1 receptor agonists” or “GLP-1 agonists,” with both terms being used interchangeably herein.

[0099] The term “GLP-1” refers to a polypeptide, glucagon-like peptide-1(7-36)amide, a 30-residue peptide hormone released from intestinal L cells following nutrient consumption. GLP-1 has the amino acid sequence of (AEGTIFTSDVSSYLEGQAAKEFIAWLVKGR-NH₂), SEQ ID NO: 301. GLP-1 is a regulatory peptide that binds to the extracellular region of the GLP-1 receptor (GLP-1R), a G-coupled protein receptor on p cell and via adenyl cyclase activity and production of cAMP stimulates the insulin response to the nutrients that are absorbed from the gut [Baggio 2007, “Biology of incretins: GLP-1 and GIP,” Gastroenterology, vol. 132(6):2131-57; Holst 2008, “The incretin system and its role in type 2 diabetes mellitus,” Mol Cell Endocrinology, vol. 297(1-2):127-36]. The effects of GLP-1R agonism are multiple. GLP-1 maintains glucose homeostasis by enhancing endogenous glucose dependent insulin secretion, rendering the 3 cells glucose competent and sensitive to GLP-1, suppressing glucagon release, restoring first and second phase insulin secretion, slowing gastric emptying, decreasing food intake, and increasing satiety [Holst 2008 Mol. Cell Endocrinology; Kjems 2003 “The influence of GLP-1 on glucose-stimulated insulin secretion: effects on beta-cell sensitivity in type 2 and nondiabetic subjects,” Diabetes, vol. 52(2): 380-86; Holst 2013 “Incretin hormones and the satiation signal,” Int J Obes (Lond), vol. 37(9):1161-69; Seufert 2014, “The extra-pancreatic effects of GLP-1 receptor agonists: a focus on the cardiovascular, gastrointestinal and central nervous systems,” Diabetes Obes Metab, vol. 16(8): 673-88]. The risk of hypoglycemia is minimal given the mode of action of GLP-1. Glucagon-like peptide-1(7-36)amide (GLP-1) is a 30-residue peptide hormone released from intestinal L cells following nutrient consumption. It potentiates the glucose-induced secretion of insulin from pancreatic beta cells, increases insulin expression, inhibits beta-cell apoptosis, promotes beta-cell neogenesis, reduces glucagon secretion, delays gastric emptying, promotes satiety and increases peripheral glucose disposal. These multiple effects have generated a great deal of interest in the discovery of long-lasting agonists of the GLP-1 receptor (GLP-1R) in order to treat type 2 diabetes. The term “exenatide” as used herein includes, but is not limited to exenatide, exenatide having the amino acid sequence of (HGEGTFTSDLSKQMEEEAVRLFIEWLKNGGPSSGAPPPS-NH₂), SEQ ID NO: 300, native exendin-4, exenatide peptides, exenatide peptide analogs, and exenatide peptide derivatives.

[0100] Certain disclosed GLP-1 receptor agonist polypeptides, including those of Table 4 below, exhibit one or more of: excellent solubility, stability, bioavailability, biological activity and specificity, and longer half-lives than those for endogenous GLP-1 and known GLP-1 receptor agonists. Certain disclosed GLP-1 receptor agonist polypeptides were developed to accommodate less frequent administration than is required for presently marketed GLP-1 receptor agonists. Certain disclosed GLP-1 receptor agonist polypeptides were developed for administration via weekly or monthly injections. Certain disclosed GLP-1 receptor agonist polypeptides were developed for administration via implantation of a delivery device comprising the GLP-1 receptor agonist polypeptide, where the delivery device comprises a dose of the GLP-1 receptor agonist polypeptide of up to 3 months, 6 months, 9 months, one year, 18 months or two years.

### DESCRIPTION OF EXEMPLARY EMBODIMENTS

[0101] In certain embodiments, the present invention provides an isolated polypeptide, comprising the amino acid sequence of SEQ ID NO: 210: HX₂X₃GTX₆X₇X₈X₉X₁₀SX₁₂X₁₃X₁₄EX₁₆X₁₇X₁₈X₁₉X₂₀X₂₁FIX₂₄WLKX₂₈GGPX₃₂SGAPPPS-(OH/NH₂) (SEQ ID NO: 210) or a pharmaceutically acceptable salt thereof, wherein:
[0102] X₂ is A, 2-aminoisobutyric acid (Aib), or G;
[0103] X₃ is E or N-methyl Glu;
[0104] X₆ is F or Y;
[0105] X₇ is S or T;
[0106] X₈ is diaminopimelic acid (Dap), E, K, N, N-methyl Ser, Q, S, s, or Y;
[0107] X₉ is D or E;
[0108] X₁₀ is I, L, N-methyl Leu, or V;
[0109] X₁₂ is E, K, Q, or S;
[0110] X₁₃ is Aib, E, K, Q, S, W, or Y;
[0111] X₁₄ is E, R, I, K, L, M, Q, or Y;
[0112] X₁₆ is 2,4-diaminobutanoic acid (Dab), Dap, E, K, k, or ornithine (Orn);
[0113] X₁₇ is E, K, or Q;
[0114] X₁₈ is A, K, S, or Y;
[0115] X₁₉ is A, K, or V;
[0116] X₂₀ is E, K, or R;
[0117] X₂₁ is Aib, E, H, K, L, Q, or Y;
[0118] X₂₄ is A, Aib, E, K, Q, S, or Y;
[0119] X₂₈ is D, E, K, N, Q, S, or Y; and
[0120] X₃₂ is Dap, H, K, R, or S;
[0121] with the proviso that the isolated polypeptide is not exenatide.

[0122] In some embodiments, X₂ is Aib.

[0123] In some embodiments, if X₂₄ is S, then X₁₀ is V.

[0124] In some embodiments, X₁₄ is Y.

[0125] In some embodiments, X₁₄ is M, and X₁₆ is K.

[0126] In some embodiments, X₁₆ is K.

[0127] In some embodiments, if X₁₆ is E, then X₂₁ is K or E. In some embodiments, if X₁₆ is E, then X₂₁ is K. In some embodiments, if X₁₆ is E, then X₂₁ is E.

[0128] In some embodiments, X₂ is A. In some embodiments, X₂ is Aib. In some embodiments, X₂ is G.

[0129] As used herein, Aib refers alternatively to 2-aminoisobutyric acid, α-aminoisobutyric acid, α-methylalanine or 2-methylalanine.

[0130] In some embodiments, X₃ is E. In some embodiments, X₃ is N-methyl Glu.

[0131] In some embodiments, X₆ is F. In some embodiments, X₆ is Y.

[0132] In some embodiments, X₇ is S. In some embodiments, X₇ is T.

[0133] In some embodiments, X₈ is Dap. In some embodiments, X₈ is E. In some embodiments, X₈ is K. In some embodiments, X₈ is N. In some embodiments, X₈ is N-methyl Ser. In some embodiments, X₈ is Q. In some embodiments, X₈ is S. In some embodiments, X₈ is s. In some embodiments, X₈ is Y.

[0134] As used herein, Dap refers to diaminopimelic acid.

[0135] As used herein, s refers to D-serine.

[0136] In some embodiments, X₉ is D. In some embodiments, X₉ is E.

[0137] In some embodiments, X₁₀ is I. In some embodiments, X₁₀ is L. In some embodiments, X₁₀ is N-methyl Leu. In some embodiments, X₁₀ is V.

[0138] In some embodiments, X₁₂ is E. In some embodiments, X₁₂ is K. In some embodiments, X₁₂ is Q. In some embodiments, X₁₂ is S.

[0139] In some embodiments, X₁₃ is Aib. In some embodiments, X₁₃ is E. In some embodiments, X₁₃ is K. In some embodiments, X₁₃ is Q. In some embodiments, X₁₃ is S. In some embodiments, X₁₃ is W. In some embodiments, X₁₃ is Y.

[0140] In some embodiments, X₁₄ is E. In some embodiments, X₁₄ is R. In some embodiments, X₁₄ is I. In some embodiments, X₁₄ is K. In some embodiments, X₁₄ is L. In some embodiments, X₁₄ is M. In some embodiments, X₁₄ is Q. In some embodiments, X₁₄ is Y.

[0141] In some embodiments, X₁₆ is Dab. In some embodiments, X₁₆ is Dap. In some embodiments, X₁₆ is E. In some embodiments, X₁₆ is K. In some embodiments, X₁₆ is k. In some embodiments, X₁₆ is Orn.

[0142] As used herein, Dab refers alternately to 2,4-diaminobutanoic acid, 2,4-diaminobutyric acid, or α,γ-diaminobutyric acid.

[0143] As used herein, k refers to D-lysine.

[0144] As used herein, Orn refers to ornithine.

[0145] In some embodiments, X₁₇ is E. In some embodiments, X₁₇ is K. In some embodiments, X₁₇ is Q.

[0146] In some embodiments, X₁₈ is A. In some embodiments, X₁₈ is K. In some embodiments, X₁₈ is S. In some embodiments, X₁₈ is Y.

[0147] In some embodiments, X₁₉ is A. In some embodiments, X₁₉ is K. In some embodiments, X₁₉ is V.

[0148] In some embodiments, X₂₀ is E. In some embodiments, X₂₀ is K. In some embodiments, X₂₀ is R.

[0149] In some embodiments, X₂₁ is Aib. In some embodiments, X₂₁ is E. In some embodiments, X₂₁ is H. In some embodiments, X₂₁ is K. In some embodiments, X₂₁ is L. In some embodiments, X₂₁ is Q. In some embodiments, X₂₁ is Y.

[0150] In some embodiments, X₂₄ is A. In some embodiments, X₂₄ is Aib. In some embodiments, X₂₄ is E. In some embodiments, X₂₄ is K. In some embodiments, X₂₄ is Q. In some embodiments, X₂₄ is S. In some embodiments, X₂₄ is Y.

[0151] In some embodiments, X₂₈ is D. In some embodiments, X₂₈ is E. In some embodiments, X₂₈ is K. In some embodiments, X₂₈ is N. In some embodiments, X₂₈ is Q. In some embodiments, X₂₈ is S. In some embodiments, X₂₈ is Y.

[0152] In some embodiments, X₃₂ is Dap. In some embodiments, X₃₂ is H. In some embodiments, X₃₂ is K. In some embodiments, X₃₂ is R. In some embodiments, X₃₂ is S.

[0153] In some embodiments, carboxy terminal amino acid, i.e. S₃₉, is —S₃₉—(NH₂). In some embodiments, carboxy terminal amino acid S₃₉ is —S₃₉—(OH).

[0154] In some embodiments, certain amino acids represented by the consensus sequence of SEQ ID NO: 210 include the following:

[0155] In some embodiments, X₂ is Aib and X₁₀ is V. In some embodiments, X₂ is Aib and X₁₄ is Y. In some embodiments, X₂ is Aib and X₁₆ is K. In some embodiments, X₂ is Aib and X₁₉ is V. In some embodiments, X₂ is Aib and X₁₉ is A. In some embodiments, X₂ is Aib and X₂₀ is R. In some embodiments, X₂ is Aib and X₂₀ is K. In some embodiments, X₂ is Aib and X₂₁ is K. In some embodiments, X₂ is Aib and X₂₁ is Q. In some embodiments, X₂ is Aib and X₂₄ is S. In some embodiments, X₂ is Aib and X₂₄ is E.

[0156] In some embodiments, X₁₀ is V and X₁₄ is Y. In some embodiments, X₁₀ is V and X₁₆ is K. In some embodiments, X₁₀ is V and X₁₉ is V. In some embodiments, X₁₀ is V and X₁₉ is A. In some embodiments, X₁₀ is V and X₂₀ is R. In some embodiments, X₁₀ is V and X₂₀ is K. In some embodiments, X₁₀ is V and X₂₁ is K. In some embodiments, X₁₀ is V and X₂₁ is Q. In some embodiments, X₁₀ is V and X₂₄ is S. In some embodiments, X₁₀ is V and X₂₄ is E.

[0157] In some embodiments, X₁₄ is Y and X₁₆ is K. In some embodiments, X₁₄ is Y and X₁₉ is V. In some embodiments, X₁₄ is Y and X₁₉ is A. In some embodiments, X₁₄ is Y and X₂₀ is R. In some embodiments, X₁₄ is Y and X₂₀ is K. In some embodiments, X₁₄ is Y and X₂₁ is K. In some embodiments, X₁₄ is Y and X₂₁ is Q. In some embodiments, X₁₄ is Y and X₂₄ is S. In some embodiments, X₁₄ is Y and X₂₄ is E.

[0158] In some embodiments, X₁₆ is K and X₁₉ is V. In some embodiments, X₁₆ is K and X₁₉ is A. In some embodiments, X₁₆ is K and X₂₀ is R. In some embodiments, X₁₆ is K and X₂₀ is K. In some embodiments, X₁₆ is K and X₂₁ is K. In some embodiments, X₁₆ is K and X₂₁ is Q. In some embodiments, X₁₆ is K and X₂₄ is S. In some embodiments, X₁₆ is K and X₂₄ is E.

[0159] In some embodiments, X₁₉ is V and X₂₀ is R. In some embodiments, X₁₉ is V and X₂₀ is K. In some embodiments, X₁₉ is V and X₂₁ is K. In some embodiments, X₁₉ is V and X₂₁ is Q. In some embodiments, X₁₉ is V and X₂₄ is S. In some embodiments, X₁₉ is V and X₂₄ is E.

[0160] In some embodiments, X₁₉ is A and X₂₀ is R. In some embodiments, X₁₉ is A and X₂₀ is K. In some embodiments, X₁₉ is A and X₂₁ is K. In some embodiments, X₁₉ is A and X₂₁ is Q. In some embodiments, X₁₉ is A and X₂₄ is S. In some embodiments, X₁₉ is A and X₂₄ is E.

[0161] In some embodiments, X₂₀ is R and X₂₁ is K. In some embodiments, X₂₀ is R and X₂₁ is Q. In some embodiments, X₂₀ is R and X₂₄ is S. In some embodiments, X₂₀ is R and X₂₄ is E.

[0162] In some embodiments, X₂₀ is K and X₂₁ is K. In some embodiments, X₂₀ is K and X₂₁ is Q. In some embodiments, X₂₀ is K and X₂₄ is S. In some embodiments, X₂₀ is K and X₂₄ is E.

[0163] In some embodiments, X₂₁ is K and X₂₄ is S. In some embodiments, X₂₁ is K and X₂₄ is E. In some embodiments, X₂₁ is Q and X₂₄ is S. In some embodiments, X₂₁ is Q and X₂₄ is E.

[0164] In some embodiments, certain amino acids represented by the consensus sequence of SEQ ID NO: 210 include the following:

[0165] In some embodiments, X₂ is Aib, X₁₀ is V, and X₁₄ is Y. In some embodiments, X₂ is Aib, X₁₀ is V, and X₁₆ is K. In some embodiments, X₂ is Aib, X₁₀ is V, and X₁₉ is V. In some embodiments, X₂ is Aib, X₁₀ is V, and X₁₉ is A. In some embodiments, X₂ is Aib, X₁₀ is V, and X₂₀ is R. In some embodiments, X₂ is Aib, X₁₀ is V, and X₂₀ is K. In some embodiments, X₂ is Aib, X₁₀ is V, and X₂₁ is K. In some embodiments, X₂ is Aib, X₁₀ is V, and X₂₁ is Q. In some embodiments, X₂ is Aib, X₁₀ is V, and X₂₄ is S. In some embodiments, X₂ is Aib, X₁₀ is V, and X₂₄ is E.

[0166] In some embodiments, X₂ is Aib, X₁₄ is Y, and X₁₆ is K. In some embodiments, X₂ is Aib, X₁₄ is Y, and X₁₉ is V. In some embodiments, X₂ is Aib, X₁₄ is Y, and X₁₉ is A. In some embodiments, X₂ is Aib, X₁₄ is Y, and X₂₀ is R. In some embodiments, X₂ is Aib, X₁₄ is Y, and X₂₀ is K. In some embodiments, X₂ is Aib, X₁₄ is Y, and X₂₁ is K. In some embodiments, X₂ is Aib, X₁₄ is Y, and X₂₁ is Q. In some embodiments, X₂ is Aib, X₁₄ is Y, and X₂₄ is S. In some embodiments, X₂ is Aib, X₁₄ is Y, and X₂₄ is E.

[0167] In some embodiments, X₁₀ is V, X₁₄ is Y, and X₁₆ is K. In some embodiments, X₁₀ is V, X₁₄ is Y, and X₁₉ is V. In some embodiments, X₁₀ is V, X₁₄ is Y, and X₁₉ is A. In some embodiments, X₁₀ is V, X₁₄ is Y, and X₂₀ is R. In some embodiments, X₁₀ is V, X₁₄ is Y, and X₂₀ is K. In some embodiments, X₁₀ is V, X₁₄ is Y, and X₂₁ is K. In some embodiments, X₁₀ is V, X₁₄ is Y, and X₂₁ is Q. In some embodiments, X₁₀ is V, X₁₄ is Y, and X₂₄ is S. In some embodiments, X₁₀ is V, X₁₄ is Y, and X₂₄ is E.

[0168] In some embodiments, X₁₄ is Y, X₁₆ is K, and X₁₉ is V. In some embodiments, X₁₄ is Y, X₁₆ is K, and X₁₉ is A. In some embodiments, X₁₄ is Y, X₁₆ is K, and X₂₀ is R. In some embodiments, X₁₄ is Y, X₁₆ is K, and X₂₀ is K. In some embodiments, X₁₄ is Y, X₁₆ is K, and X₂₁ is K. In some embodiments, X₁₄ is Y, X₁₆ is K, and X₂₁ is Q. In some embodiments, X₁₄ is Y, X₁₆ is K, and X₂₄ is S. In some embodiments, X₁₄ is Y, X₁₆ is K, and X₂₄ is E.

[0169] In some embodiments, X₁₄ is Y, X₁₉ is V, and X₂₁ is K. In some embodiments, X₁₄ is Y, X₁₉ is A, and X₂₁ is K. In some embodiments, X₁₄ is Y, X₂₀ is R, and X₂₁ is K. In some embodiments, X₁₄ is Y, X₂₀ is K, and X₂₁ is K. In some embodiments, X₁₄ is Y, X₂₁ is K, and X₂₄ is S. In some embodiments, X₁₄ is Y, X₂₁ is K, and X₂₄ is E.

[0170] In some embodiments, X₁₆ is K, X₁₉ is A, and X₂₀ is R. In some embodiments, X₁₆ is K, X₁₉ is A, and X₂₀ is K. In some embodiments, X₁₆ is K, X₁₉ is A, and X₂₁ is K. In some embodiments, X₁₆ is K, X₁₉ is A, and X₂₁ is Q. In some embodiments, X₁₆ is K, X₁₉ is A, and X₂₄ is S. In some embodiments, X₁₆ is K, X₁₉ is A, and X₂₄ is E.

[0171] In some embodiments, X₁₉ is V, X₂₀ is R, and X₂₁ is K. In some embodiments, X₁₉ is V, X₂₀ is R, and X₂₁ is Q. In some embodiments, X₁₉ is V, X₂₀ is R, and X₂₄ is S. In some embodiments, X₁₉ is V, X₂₀ is R, and X₂₄ is E.

[0172] In some embodiments, X₁₉ is A, X₂₀ is R, and X₂₁ is K. In some embodiments, X₁₉ is A, X₂₀ is R, and X₂₁ is Q. In some embodiments, X₁₉ is A, X₂₀ is R, and X₂₄ is S. In some embodiments, X₁₉ is A, X₂₀ is R, and X₂₄ is E.

[0173] In some embodiments, X₂₀ is R, X₂₁ is K, and X₂₄ is S. In some embodiments, X₂₀ is R, X₂₁ is K, and X₂₄ is E.

[0174] In some embodiments, X₂₀ is K, X₂₁ is K, and X₂₄ is S. In some embodiments, X₂₀ is K, X₂₁ is K, and X₂₄ is E.

[0175] In certain embodiments, the present invention provides an isolated polypeptide, comprising the amino acid sequence of SEQ ID NO: 200: HX₂X₃GTX₆X₇X₈X₉X₁₀SX₁₂X₁₃X₁₄EX₁₆X₁₇X₁₈X₁₉X₂₀X₂₁FIX₂₄WLKX₂₈GGPX₃₂SGAPPPS-(OH/NH₂) (SEQ ID NO: 200) or a pharmaceutically acceptable salt thereof, wherein:
[0176] X₂ is A, 2-aminoisobutyric acid (Aib), or G;
[0177] X₃ is E or N-methyl Glu;
[0178] X₆ is F or Y;
[0179] X₇ is S or T;
[0180] X₈ is diaminopimelic acid (Dap), E, K, N, N-methyl Ser, Q, S, s, or Y;
[0181] X₉ is D or E;
[0182] X₁₀ is I, L, N-methyl Leu, or V;
[0183] X₁₂ is E, K, Q, or S;
[0184] X₁₃ is Aib, E, K, Q, S, W, or Y;
[0185] X₁₄ is E, R, I, K, L, M, Q, or Y;
[0186] X₁₆ is 2,4-diaminobutanoic acid (Dab), Dap, E, K, k, or ornithine (Orn);
[0187] X₁₇ is E, K, or Q;
[0188] X₁₈ is A, K, S, or Y;
[0189] X₁₉ is A, K, or V;
[0190] X₂₀ is E, K, or R;
[0191] X₂₁ is Aib, E, H, K, L, Q, or Y;
[0192] X₂₄ is A, Aib, E, K, Q, S, or Y;
[0193] X₂₈ is D, E, K, N, Q, S, or Y; and
[0194] X₃₂ is Dap, H, K, R, or S;
[0195] wherein when X₁₆ is Dab, Dap, K, k, or Orn, it is covalently bound to a lipophilic substituent, optionally via a spacer;
[0196] wherein when X₁₆ is E, at least one of X₁₄, X₁₇, X₁₈, X₁₉, X₂₀, or X₂₁ is selected to be lysine wherein the lysine residue is covalently bound to a lipophilic substituent, optionally via a spacer; and
[0197] wherein the isolated polypeptide optionally further comprises two amino acid residues having side chains that are covalently joined to form a bridging moiety.

[0198] In one embodiment, the isolated polypeptide is not an analogue of exenatide, HGEGTFTSDLSKQMEEEAVRLFIEWLKNGGPSSGAPPPS-NH₂ (SEQ ID NO: 300), having K₁₂ or K₂₇ covalently bound to a lipophilic substituent, optionally via a spacer.

[0199] In some embodiments, X₂ is Aib.

[0200] In some embodiments, if X₂₄ is S, then X₁₀ is V.

[0201] In some embodiments, X₁₄ is Y.

[0202] In some embodiments, X₁₄ is M, and X₁₆ is K covalently bound to a lipophilic substituent, optionally via a spacer.

[0203] In some embodiments, X₁₆ is K covalently bound to a lipophilic substituent, optionally via a spacer.

[0204] In some embodiments, if X₁₆ is E, then X₂₁ is K or E. In some embodiments, if X₁₆ is E, then X₂₁ is K. In some embodiments, if X₁₆ is E, then X₂₁ is E.

[0205] In some embodiments, the peptide further comprises a lactam bridge formed via an amide bond between the side chains of a lysine and a glutamic acid at positions X₂₀ and X₂₄, respectively.

[0206] In some embodiments, X₂ is A. In some embodiments, X₂ is Aib. In some embodiments, X₂ is G.

[0207] In some embodiments, X₃ is E. In some embodiments, X₃ is N-methyl Glu.

[0208] In some embodiments, X₆ is F. In some embodiments, X₆ is Y.

[0209] In some embodiments, X₇ is S. In some embodiments, X₇ is T.

[0210] In some embodiments, X₈ is Dap. In some embodiments, X₈ is E. In some embodiments, X₈ is K. In some embodiments, X₈ is N. In some embodiments, X₈ is N-methyl Ser. In some embodiments, X₈ is Q. In some embodiments, X₈ is S. In some embodiments, X₈ is s. In some embodiments, X₈ is Y.

[0211] In some embodiments, X₉ is D. In some embodiments, X₉ is E.

[0212] In some embodiments, X₁₀ is I. In some embodiments, X₁₀ is L. In some embodiments, X₁₀ is N-methyl Leu. In some embodiments, X₁₀ is V.

[0213] In some embodiments, X₁₂ is E. In some embodiments, X₁₂ is K. In some embodiments, X₁₂ is Q. In some embodiments, X₁₂ is S.

[0214] In some embodiments, X₁₃ is Aib. In some embodiments, X₁₃ is E. In some embodiments, X₁₃ is K. In some embodiments, X₁₃ is Q. In some embodiments, X₁₃ is S. In some embodiments, X₁₃ is W. In some embodiments, X₁₃ is Y.

[0215] In some embodiments, X₁₄ is E. In some embodiments, X₁₄ is R. In some embodiments, X₁₄ is I. In some embodiments, X₁₄ is K. In some embodiments, X₁₄ is L. In some embodiments, X₁₄ is M. In some embodiments, X₁₄ is Q. In some embodiments, X₁₄ is Y.

[0216] In some embodiments, X₁₇ is E. In some embodiments, X₁₇ is K. In some embodiments, X₁₇ is Q.

[0217] In some embodiments, X₁₈ is A. In some embodiments, X₁₈ is K. In some embodiments, X₁₈ is S. In some embodiments, X₁₈ is Y.

[0218] In some embodiments, X₁₉ is A. In some embodiments, X₁₉ is K. In some embodiments, X₁₉ is V.

[0219] In some embodiments, X₂₀ is E. In some embodiments, X₂₀ is K. In some embodiments, X₂₀ is R.

[0220] In some embodiments, X₂₁ is Aib. In some embodiments, X₂₁ is E. In some embodiments, X₂₁ is H. In some embodiments, X₂₁ is K. In some embodiments, X₂₁ is L. In some embodiments, X₂₁ is Q. In some embodiments, X₂₁ is Y.

[0221] In some embodiments, X₂₄ is A. In some embodiments, X₂₄ is Aib. In some embodiments, X₂₄ is E. In some embodiments, X₂₄ is K. In some embodiments, X₂₄ is Q. In some embodiments, X₂₄ is S. In some embodiments, X₂₄ is Y.

[0222] In some embodiments, X₂₈ is D. In some embodiments, X₂₈ is E. In some embodiments, X₂₈ is K. In some embodiments, X₂₈ is N. In some embodiments, X₂₈ is Q. In some embodiments, X₂₈ is S. In some embodiments, X₂₈ is Y.

[0223] In some embodiments, X₃₂ is Dap. In some embodiments, X₃₂ is H. In some embodiments, X₃₂ is K. In some embodiments, X₃₂ is R. In some embodiments, X₃₂ is S.

[0224] In some embodiments, carboxy terminal amino acid, i.e. S₃₉, is —S₃₉—(NH₂). In some embodiments, carboxy terminal amino acid S₃₉ is —S₃₉—(OH).

[0225] In some embodiments, X₁₆ is Dab, Dap, K, or Orn covalently bound to a lipophilic substituent, optionally via a spacer. In some embodiments, X₁₆ is Dab, covalently bound to a lipophilic substituent, optionally via a spacer. In some embodiments, X₁₆ is Dap, covalently bound to a lipophilic substituent, optionally via a spacer. In some embodiments, X₁₆ is K, covalently bound to a lipophilic substituent, optionally via a spacer. In some embodiments, X₁₆ is k, covalently bound to a lipophilic substituent, optionally via a spacer. In some embodiments, X₁₆ is Orn, covalently bound to a lipophilic substituent, optionally via a spacer.

[0226] In some embodiments, X₁₆ is E, and at least one of X₁₄, X₁₇, X₁₈, X₁₉, X₂₀, or X₂₁ is selected to be lysine wherein the lysine residue is covalently bound to a lipophilic substituent, optionally via a spacer. In some embodiments, X₁₆ is E, and X₁₄ is lysine wherein the lysine residue is covalently bound to a lipophilic substituent, optionally via a spacer. In some embodiments, X₁₆ is E, and X₁₇ is lysine wherein the lysine residue is covalently bound to a lipophilic substituent, optionally via a spacer. In some embodiments, X₁₆ is E, and X₁₈ is lysine wherein the lysine residue is covalently bound to a lipophilic substituent, optionally via a spacer. In some embodiments, X₁₆ is E, and X₁₉ is lysine wherein the lysine residue is covalently bound to a lipophilic substituent, optionally via a spacer. In some embodiments, X₁₆ is E, and X₂₀ is lysine wherein the lysine residue is covalently bound to a lipophilic substituent, optionally via a spacer. In some embodiments, X₁₆ is E, and X₂₁ is lysine wherein the lysine residue is covalently bound to a lipophilic substituent, optionally via a spacer.

[0227] In some embodiments, the isolated polypeptide further comprises two amino acid residues having side chains that are covalently joined to form a bridging moiety. In some embodiments, the isolated polypeptide optionally further comprises two amino acid residues, wherein one is lysine (K) and the other is glutamic acid (E), and wherein the amino-containing sidechain of lysine and the carboxy-containing sidechain of glutamic acid are covalently joined, with loss of water, to form a lactam bridging moiety. In some embodiments, the lactam bridging moiety is formed via covalent bonds between side chains of a lysine (K) and a glutamic acid (E) residues at positions X₁₇ and X₂₁, respectively; at positions X₂₁ and X₁₇, respectively; at positions X₂₁ and X₂₈, respectively; at positions X₂₈ and X₂₁, respectively; at positions X₂₀ and X₂₄, respectively; at positions X₂₄ and X₂₀, respectively; or at positions X₁₂ and X₁₆, respectively. In some embodiments, the lactam bridging moiety is formed between side chains of a lysine (K) and a glutamic acid (E) residues at positions X₁₇ and X₂₁, respectively. In some embodiments, the lactam bridging moiety is formed between side chains of a lysine (K) and a glutamic acid (E) residues at positions X₂₁ and X₁₇, respectively. In some embodiments, the lactam bridging moiety is formed between side chains of a lysine (K) and a glutamic acid (E) residues at positions X₂₁ and X₂₈, respectively. In some embodiments, the lactam bridging moiety is formed between side chains of a lysine (K) and a glutamic acid (E) residues at positions X₂₈ and X₂₁, respectively. In some embodiments, the lactam bridging moiety is formed between side chains of a lysine (K) and a glutamic acid (E) residues at positions X₂₀ and X₂₄, respectively. In some embodiments, the lactam bridging moiety is formed between side chains of a lysine (K) and a glutamic acid (E) residues at positions X₂₄ and X₂₀, respectively. In some embodiments, the lactam bridging moiety is formed covalent bonds between side chains of a lysine (K) and a glutamic acid (E) residues at positions X₁₂ and X₁₆, respectively.

[0228] In some embodiments, when K is selected at position X₈, X₁₂, X₁₃, X₁₄, X₁₇, X₁₈, X₁₉, X₂₀, X₂₁, X₂₄, X₂₈, or X₃₂, it represents lysine optionally covalently bound to a lipophilic substituent, optionally via a spacer.

[0229] In some embodiments, when K is selected at position X₁₄, X₁₇, X₁₈, X₁₉, X₂₀, or X₂₁, it represents lysine optionally covalently bound to a lipophilic substituent, optionally via a spacer.

[0230] In some embodiments, only the residue at X₁₆ may be covalently bound to a lipophilic substituent, optionally via a spacer.

[0231] In certain embodiments, the present invention provides an isolated polypeptide, comprising the amino acid sequence of SEQ ID NO: 201 or a pharmaceutically acceptable salt thereof, wherein: HX₂X₃GTX₆X₇X₈X₉X₁₀SX₁₂X₁₃YEX₁₆X₁₇X₁₈X₁₉X₂₀X₂₁FIX₂₄WLKX₂₈GGPX₃₂SGAPPPS-(OH/NH₂) (SEQ ID NO: 201) or a pharmaceutically acceptable salt thereof, wherein:
[0232] X₂ is A, 2-aminoisobutyric acid (Aib), or G;
[0233] X₃ is E or N-methyl Glu;
[0234] X₆ is F or Y;
[0235] X₇ is S or T;
[0236] X₈ is diaminopimelic acid (Dap), E, K, N, N-methyl Ser, Q, S, s, or Y;
[0237] X₉ is D or E;
[0238] X₁₀ is I, L, N-methyl Leu, or V;
[0239] X₁₂ is E, K, Q, or S;
[0240] X₁₃ is Aib, E, K, Q, S, W, or Y;
[0241] X₁₆ is K covalently bound to a lipophilic substituent, optionally via a spacer;
[0242] X₁₇ is E, K, or Q;
[0243] X₁₈ is A, K, S, or Y;
[0244] X₁₉ is A, K, or V;
[0245] X₂₀ is E, K, or R;
[0246] X₂₁ is Aib, E, H, K, L, Q, or Y;
[0247] X₂₄ is A, Aib, E, K, Q, S, or Y;
[0248] X₂₈ is D, E, K, N, Q, S, or Y; and
[0249] X₃₂ is Dap, H, K, R, or S;
[0250] wherein the peptide optionally further comprises a lactam bridge formed via an amide bond between the side chains of a lysine and a glutamic acid at positions X₁₇ and X₂₁, respectively; at positions X₂₁ and X₁₇, respectively; at positions X₂₁ and X₂₈, respectively; at positions X₂₈ and X₂₁, respectively; at positions X₂₀ and X₂₄, respectively; or at positions X₂₄ and X₂₀, respectively.

[0251] In some embodiments, X₂ is Aib.

[0252] In some embodiments, if X₂₄ is S, then X₁₀ is V.

[0253] In some embodiments, the peptide further comprises a lactam bridge formed via an amide bond between the side chains of a lysine and a glutamic acid at positions X₂₀ and X₂₄, respectively.

[0254] In some embodiments, X₂ is A. In some embodiments, X₂ is Aib. In some embodiments, X₂ is G.

[0255] In some embodiments, X₃ is E. In some embodiments, X₃ is N-methyl Glu.

[0256] In some embodiments, X₆ is F. In some embodiments, X₆ is Y.

[0257] In some embodiments, X₇ is S. In some embodiments, X₇ is T.

[0258] In some embodiments, X₈ is Dap. In some embodiments, X₈ is E. In some embodiments, X₈ is K. In some embodiments, X₈ is N. In some embodiments, X₈ is N-methyl Ser. In some embodiments, X₈ is Q. In some embodiments, X₈ is S. In some embodiments, X₈ is s. In some embodiments, X₈ is Y.

[0259] In some embodiments, X₉ is D. In some embodiments, X₉ is E.

[0260] In some embodiments, X₁₀ is I. In some embodiments, X₁₀ is L. In some embodiments, X₁₀ is N-methyl Leu. In some embodiments, X₁₀ is V.

[0261] In some embodiments, X₁₂ is E. In some embodiments, X₁₂ is K. In some embodiments, X₁₂ is Q. In some embodiments, X₁₂ is S.

[0262] In some embodiments, X₁₃ is Aib. In some embodiments, X₁₃ is E. In some embodiments, X₁₃ is K. In some embodiments, X₁₃ is Q. In some embodiments, X₁₃ is S. In some embodiments, X₁₃ is W. In some embodiments, X₁₃ is Y.

[0263] In some embodiments, X₁₇ is E. In some embodiments, X₁₇ is K. In some embodiments, X₁₇ is Q.

[0264] In some embodiments, X₁ₛ is A. In some embodiments, X₁ₛ is K. In some embodiments, X₁ₛ is S. In some embodiments, X₁ₛ is Y.

[0265] In some embodiments, X₁₉ is A. In some embodiments, X₁₉ is K. In some embodiments, X₁₉ is V.

[0266] In some embodiments, X₂₀ is E. In some embodiments, X₂₀ is K. In some embodiments, X₂₀ is R.

[0267] In some embodiments, X₂₁ is Aib. In some embodiments, X₂₁ is E. In some embodiments, X₂₁ is H. In some embodiments, X₂₁ is K. In some embodiments, X₂₁ is L. In some embodiments, X₂₁ is Q. In some embodiments, X₂₁ is Y.

[0268] In some embodiments, X₂₄ is A. In some embodiments, X₂₄ is Aib. In some embodiments, X₂₄ is E. In some embodiments, X₂₄ is K. In some embodiments, X₂₄ is Q. In some embodiments, X₂₄ is S. In some embodiments, X₂₄ is Y.

[0269] In some embodiments, X₂₈ is D. In some embodiments, X₂₈ is E. In some embodiments, X₂₈ is K. In some embodiments, X₂₈ is N. In some embodiments, X₂₈ is Q. In some embodiments, X₂₈ is S. In some embodiments, X₂₈ is Y.

[0270] In some embodiments, X₃₂ is Dap. In some embodiments, X₃₂ is H. In some embodiments, X₃₂ is K. In some embodiments, X₃₂ is R. In some embodiments, X₃₂ is S.

[0271] In some embodiments, carboxy terminal amino acid, i.e. S₃₉, is —S₃₉—(NH₂). In some embodiments, carboxy terminal amino acid S₃₉ is —S₃₉—(OH).

[0272] In some embodiments, the isolated peptide further comprises a lactam bridge formed via an amide bond between the side chains of a lysine and a glutamic acid at positions X₁₇ and X₂₁, respectively. In some embodiments, the isolated peptide further comprises a lactam bridge formed via an amide bond between the side chains of a lysine and a glutamic acid at positions X₂₁ and X₁₇, respectively. In some embodiments, the isolated peptide further comprises a lactam bridge formed via an amide bond between the side chains of a lysine and a glutamic acid at positions X₂₁ and X₂₈, respectively. In some embodiments, the isolated peptide further comprises a lactam bridge formed via an amide bond between the side chains of a lysine and a glutamic acid at positions X₂₈ and X₂₁, respectively. In some embodiments, the isolated peptide further comprises a lactam bridge formed via an amide bond between the side chains of a lysine and a glutamic acid at positions X₂₀ and X₂₄, respectively. In some embodiments, the isolated peptide further comprises a lactam bridge formed via an amide bond between the side chains of a lysine and a glutamic acid at positions X₂₄ and X₂₀, respectively.

[0273] In some embodiments, when K is selected at position X₈, X₁₂, X₁₃, X₁₇, X₁₈, X₁₉, X₂₀, X₂₁, X₂₄, X₂₈, or X₃₂, it represents lysine optionally covalently bound to a lipophilic substituent, optionally via a spacer.

[0274] In some embodiments, when K is selected at position X₁₇, X₁₈, X₁₉, X₂₀, or X₂₁, it represents lysine optionally covalently bound to a lipophilic substituent, optionally via a spacer.

[0275] In some embodiments, only the residue at X₁₆ is covalently bound to a lipophilic substituent, optionally via a spacer.

[0276] In some embodiments, certain amino acids represented by the consensus sequence of SEQ ID NO: 200 or SEQ ID NO: 201 include the following:

[0277] In some embodiments, X₂ is Aib and X₁₀ is V. In some embodiments, X₂ is Aib and X₁₄ is Y. In some embodiments, X₂ is Aib and X₁₆ is K covalently bound to a lipophilic substituent, optionally via a spacer. In some embodiments, X₂ is Aib and X₁₉ is V. In some embodiments, X₂ is Aib and X₁₉ is A. In some embodiments, X₂ is Aib and X₂₀ is R. In some embodiments, X₂ is Aib and X₂₀ is K. In some embodiments, X₂ is Aib and X₂₁ is K. In some embodiments, X₂ is Aib and X₂₁ is Q. In some embodiments, X₂ is Aib and X₂₄ is S. In some embodiments, X₂ is Aib and X₂₄ is E.

[0278] In some embodiments, X₁₀ is V and X₁₄ is Y. In some embodiments, X₁₀ is V and X₁₆ is K covalently bound to a lipophilic substituent, optionally via a spacer. In some embodiments, X₁₀ is V and X₁₉ is V. In some embodiments, X₁₀ is V and X₁₉ is A. In some embodiments, X₁₀ is V and X₂₀ is R. In some embodiments, X₁₀ is V and X₂₀ is K. In some embodiments, X₁₀ is V and X₂₁ is K. In some embodiments, X₁₀ is V and X₂₁ is Q. In some embodiments, X₁₀ is V and X₂₄ is S. In some embodiments, X₁₀ is V and X₂₄ is E.

[0279] In some embodiments, X₁₄ is Y and X₁₆ is K covalently bound to a lipophilic substituent, optionally via a spacer. In some embodiments, X₁₄ is Y and X₁₉ is V. In some embodiments, X₁₄ is Y and X₁₉ is A. In some embodiments, X₁₄ is Y and X₂₀ is R. In some embodiments, X₁₄ is Y and X₂₀ is K. In some embodiments, X₁₄ is Y and X₂₁ is K. In some embodiments, X₁₄ is Y and X₂₁ is Q. In some embodiments, X₁₄ is Y and X₂₄ is S. In some embodiments, X₁₄ is Y and X₂₄ is E.

[0280] In some embodiments, X₁₆ is K covalently bound to a lipophilic substituent, optionally via a spacer, and X₁₉ is V. In some embodiments, X₁₆ is K covalently bound to a lipophilic substituent, optionally via a spacer, and X₁₉ is A. In some embodiments, X₁₆ is K covalently bound to a lipophilic substituent, optionally via a spacer, and X₂₀ is R. In some embodiments, X₁₆ is K covalently bound to a lipophilic substituent, optionally via a spacer, and X₂₀ is K. In some embodiments, X₁₆ is K covalently bound to a lipophilic substituent, optionally via a spacer, and X₂₁ is K. In some embodiments, X₁₆ is K covalently bound to a lipophilic substituent, optionally via a spacer, and X₂₁ is Q. In some embodiments, X₁₆ is K covalently bound to a lipophilic substituent, optionally via a spacer, and X₂₄ is S. In some embodiments, X₁₆ is K covalently bound to a lipophilic substituent, optionally via a spacer, and X₂₄ is E.

[0281] In some embodiments, X₁₉ is V and X₂₀ is R. In some embodiments, X₁₉ is V and X₂₀ is K. In some embodiments, X₁₉ is V and X₂₁ is K. In some embodiments, X₁₉ is V and X₂₁ is Q. In some embodiments, X₁₉ is V and X₂₄ is S. In some embodiments, X₁₉ is V and X₂₄ is E.

[0282] In some embodiments, X₁₉ is A and X₂₀ is R. In some embodiments, X₁₉ is A and X₂₀ is K. In some embodiments, X₁₉ is A and X₂₁ is K. In some embodiments, X₁₉ is A and X₂₁ is Q. In some embodiments, X₁₉ is A and X₂₄ is S. In some embodiments, X₁₉ is A and X₂₄ is E.

[0283] In some embodiments, X₂₀ is R and X₂₁ is K. In some embodiments, X₂₀ is R and X₂₁ is Q. In some embodiments, X₂₀ is R and X₂₄ is S. In some embodiments, X₂₀ is R and X₂₄ is E.

[0284] In some embodiments, X₂₀ is K and X₂₁ is K. In some embodiments, X₂₀ is K and X₂₁ is Q. In some embodiments, X₂₀ is K and X₂₄ is S. In some embodiments, X₂₀ is K and X₂₄ is E. In some embodiments, X₂₀ is K, X₂₄ is E, and the peptide comprises a lactam bridge formed via an amide bond between the side chains of X₂₀ and X₂₄.

[0285] In some embodiments, X₂₁ is K and X₂₄ is S. In some embodiments, X₂₁ is K and X₂₄ is E.

[0286] In some embodiments, X₂₁ is Q and X₂₄ is S. In some embodiments, X₂₁ is Q and X₂₄ is E.

[0287] In some embodiments, certain amino acids represented by the consensus sequence of SEQ ID NO: 200 or SEQ ID NO: 201 include the following:

[0288] In some embodiments, X₂ is Aib, X₁₀ is V, and X₁₄ is Y. In some embodiments, X₂ is Aib, X₁₀ is V, and X₁₆ is K covalently bound to a lipophilic substituent, optionally via a spacer. In some embodiments, X₂ is Aib, X₁₀ is V, and X₁₉ is V. In some embodiments, X₂ is Aib, X₁₀ is V, and X₁₉ is A. In some embodiments, X₂ is Aib, X₁₀ is V, and X₂₀ is R. In some embodiments, X₂ is Aib, X₁₀ is V, and X₂₀ is K. In some embodiments, X₂ is Aib, X₁₀ is V, and X₂₁ is K. In some embodiments, X₂ is Aib, X₁₀ is V, and X₂₁ is Q. In some embodiments, X₂ is Aib, X₁₀ is V, and X₂₄ is S. In some embodiments, X₂ is Aib, X₁₀ is V, and X₂₄ is E.

[0289] In some embodiments, X₂ is Aib, X₁₄ is Y, and X₁₆ is K covalently bound to a lipophilic substituent, optionally via a spacer. In some embodiments, X₂ is Aib, X₁₄ is Y, and X₁₉ is V. In some embodiments, X₂ is Aib, X₁₄ is Y, and X₁₉ is A. In some embodiments, X₂ is Aib, X₁₄ is Y, and X₂₀ is R. In some embodiments, X₂ is Aib, X₁₄ is Y, and X₂₀ is K. In some embodiments, X₂ is Aib, X₁₄ is Y, and X₂₁ is K. In some embodiments, X₂ is Aib, X₁₄ is Y, and X₂₁ is Q. In some embodiments, X₂ is Aib, X₁₄ is Y, and X₂₄ is S. In some embodiments, X₂ is Aib, X₁₄ is Y, and X₂₄ is E.

[0290] In some embodiments, X₁₀ is V, X₁₄ is Y, and X₁₆ is K covalently bound to a lipophilic substituent, optionally via a spacer. In some embodiments, X₁₀ is V, X₁₄ is Y, and X₁₉ is V. In some embodiments, X₁₀ is V, X₁₄ is Y, and X₁₉ is A. In some embodiments, X₁₀ is V, X₁₄ is Y, and X₂₀ is R. In some embodiments, X₁₀ is V, X₁₄ is Y, and X₂₀ is K. In some embodiments, X₁₀ is V, X₁₄ is Y, and X₂₁ is K. In some embodiments, X₁₀ is V, X₁₄ is Y, and X₂₁ is Q. In some embodiments, X₁₀ is V, X₁₄ is Y, and X₂₄ is S. In some embodiments, X₁₀ is V, X₁₄ is Y, and X₂₄ is E.

[0291] In some embodiments, X₁₄ is Y; X₁₆ is K covalently bound to a lipophilic substituent, optionally via a spacer; and X₁₉ is V. In some embodiments, X₁₄ is Y; X₁₆ is K covalently bound to a lipophilic substituent, optionally via a spacer; and X₁₉ is A. In some embodiments, X₁₄ is Y; X₁₆ is K covalently bound to a lipophilic substituent, optionally via a spacer; and X₂₀ is R. In some embodiments, X₁₄ is Y; X₁₆ is K covalently bound to a lipophilic substituent, optionally via a spacer; and X₂₀ is K. In some embodiments, X₁₄ is Y; X₁₆ is K covalently bound to a lipophilic substituent, optionally via a spacer; and X₂₁ is K. In some embodiments, X₁₄ is Y; X₁₆ is K covalently bound to a lipophilic substituent, optionally via a spacer; and X₂₁ is Q. In some embodiments, X₁₄ is Y; X₁₆ is K covalently bound to a lipophilic substituent, optionally via a spacer; and X₂₄ is S. In some embodiments, X₁₄ is Y; X₁₆ is K covalently bound to a lipophilic substituent, optionally via a spacer; and X₂₄ is E.

[0292] In some embodiments, X₁₄ is Y, X₁₉ is V, and X₂₁ is K. In some embodiments, X₁₄ is Y, X₁₉ is A, and X₂₁ is K. In some embodiments, X₁₄ is Y, X₂₀ is R, and X₂₁ is K. In some embodiments, X₁₄ is Y, X₂₀ is K, and X₂₁ is K. In some embodiments, X₁₄ is Y, X₂₁ is K, and X₂₄ is S. In some embodiments, X₁₄ is Y, X₂₁ is K, and X₂₄ is E.

[0293] In some embodiments, X₁₆ is K covalently bound to a lipophilic substituent, optionally via a spacer; X₁₉ is A; and X₂₀ is R. In some embodiments, X₁₆ is K covalently bound to a lipophilic substituent, optionally via a spacer; X₁₉ is A; and X₂₀ is K. In some embodiments, X₁₆ is K covalently bound to a lipophilic substituent, optionally via a spacer; X₁₉ is A; and X₂₁ is K. In some embodiments, X₁₆ is K covalently bound to a lipophilic substituent, optionally via a spacer; X₁₉ is A; and X₂₁ is Q. In some embodiments, X₁₆ is K covalently bound to a lipophilic substituent, optionally via a spacer; X₁₉ is A; and X₂₄ is S. In some embodiments, X₁₆ is K covalently bound to a lipophilic substituent, optionally via a spacer; X₁₉ is A; and X₂₄ is E.

[0294] In some embodiments, X₁₉ is V, X₂₀ is R, and X₂₁ is K. In some embodiments, X₁₉ is V, X₂₀ is R, and X₂₁ is Q. In some embodiments, X₁₉ is V, X₂₀ is R, and X₂₄ is S. In some embodiments, X₁₉ is V, X₂₀ is R, and X₂₄ is E.

[0295] In some embodiments, X₁₉ is A, X₂₀ is R, and X₂₁ is K. In some embodiments, X₁₉ is A, X₂₀ is R, and X₂₁ is Q. In some embodiments, X₁₉ is A, X₂₀ is R, and X₂₄ is S. In some embodiments, X₁₉ is A, X₂₀ is R, and X₂₄ is E.

[0296] In some embodiments, X₂₀ is R, X₂₁ is K, and X₂₄ is S. In some embodiments, X₂₀ is R, X₂₁ is K, and X₂₄ is E.

[0297] In some embodiments, X₂₀ is K, X₂₁ is K, and X₂₄ is S. In some embodiments, X₂₀ is K, X₂₁ is K, and X₂₄ is E. In some embodiments, X₂₀ is K, X₂₁ is K, X₂₄ is E, and the peptide comprises a lactam bridge formed via an amide bond between the side chains of X₂₀ and X₂₄.

[0298] In certain embodiments, the present invention provides an isolated polypeptide, comprising the amino acid sequence of SEQ ID NO: 202: HX₂EGTFTX₈X₉X₁₀SX₁₂QX₁₄EX₁₆X₁₇X₁₈X₁₉X₂₀X₂₁FIX₂₄WLKX₂₈GGPX₃₂SGAPPPS-(OH/NH₂) (SEQ ID NO: 202) or a pharmaceutically acceptable salt thereof, wherein:
[0299] X₂ is 2-aminoisobutyric acid (Aib) or G;
[0300] X₈ is N or S;
[0301] X₉ is D or E;
[0302] X₁₀ is I, L, or V;
[0303] X₁₂ is E or K;
[0304] X₁₄ is M or Y;
[0305] X₁₆ is Dap, E, or K;
[0306] X₁₇ is E or K;
[0307] X is A or Y;
[0308] X₁₉ is A or V;
[0309] X₂₀ is E, K, or R;
[0310] X₂₁ is E, K, L, or Q;
[0311] X₂₄ is E, K, or S;
[0312] X₂₈ is E, K, N, or Q; and
[0313] X₃₂ is H or S;
[0314] wherein when X₁₆ is Dap or K, it is covalently bound to a lipophilic substituent, optionally via a spacer;
[0315] wherein when X₁₆ is E, at least one of X₁₇, X₂₀, or X₂₁ is selected to be lysine wherein the lysine residue is covalently bound to a lipophilic substituent, optionally via a spacer; and
[0316] wherein the peptide optionally further comprises a lactam bridge formed via an amide bond between the side chains of a lysine and a glutamic acid at positions X₁₇ and X₂₁, respectively; at positions X₂₁ and X₁₇, respectively; at positions X₂₁ and X₂₈, respectively; at positions X₂₈ and X₂₁, respectively; at positions X₂₀ and X₂₄, respectively; at positions X₂₄ and X₂₀, respectively; or at positions X₁₂ and X₁₆, respectively.

[0317] In some embodiments, X₂ is Aib.

[0318] In some embodiments, if X₂₄ is S, then X₁₀ is V.

[0319] In some embodiments, X₁₄ is Y.

[0320] In some embodiments, X₁₄ is M, and X₁₆ is K covalently bound to a lipophilic substituent, optionally via a spacer.

[0321] In some embodiments, X₁₆ is K covalently bound to a lipophilic substituent, optionally via a spacer.

[0322] In some embodiments, if X₁₆ is E, then X₂₁ is K or E. In some embodiments, if X₁₆ is E, then X₂₁ is K. In some embodiments, if X₁₆ is E, then X₂₁ is E.

[0323] In some embodiments, the peptide further comprises a lactam bridge formed via an amide bond between the side chains of a lysine and a glutamic acid at positions X₂₀ and X₂₄, respectively.

[0324] In some embodiments, X₂ is Aib. In some embodiments, X₂ is G.

[0325] In some embodiments, X₈ is N. In some embodiments, X₈ is S.

[0326] In some embodiments, X₉ is D. In some embodiments, X₉ is E.

[0327] In some embodiments, X₁₀ is I. In some embodiments, X₁₀ is L. In some embodiments, X₁₀ is V.

[0328] In some embodiments, X₁₂ is E. In some embodiments, X₁₂ is K.

[0329] In some embodiments, X₁₄ is M. In some embodiments, X₁₄ is Y.

[0330] In some embodiments, X₁₆ is Dap covalently bound to a lipophilic substituent, optionally via a spacer. In some embodiments, X₁₆ is K covalently bound to a lipophilic substituent, optionally via a spacer. In some embodiments, X₁₆ is E, and at least one of X₁₇, X₂₀, or X₂₁ is selected to be lysine wherein the lysine residue is covalently bound to a lipophilic substituent, optionally via a spacer.

[0331] In some embodiments, X₁₇ is E. In some embodiments, X₁₇ is K.

[0332] In some embodiments, X₁₈ is A. In some embodiments, X₁₈ is Y.

[0333] In some embodiments, X₁₉ is A. In some embodiments, X₁₉ is V.

[0334] In some embodiments, X₂₀ is E. In some embodiments, X₂₀ is K. In some embodiments, X₂₀ is R.

[0335] In some embodiments, X₂₁ is E. In some embodiments, X₂₁ is K. In some embodiments, X₂₁ is L. In some embodiments, X₂₁ is Q.

[0336] In some embodiments, X₂₄ is E. In some embodiments, X₂₄ is K. In some embodiments, X₂₄ is S.

[0337] In some embodiments, X₂₈ is E. In some embodiments, X₂₈ is K. In some embodiments, X₂₈ is N. In some embodiments, X₂₈ is Q.

[0338] In some embodiments, X₃₂ is H. In some embodiments, X₃₂ is S.

[0339] In some embodiments, carboxy terminal amino acid, i.e. S₃₉, is —S₃₉—(NH₂). In some embodiments, carboxy terminal amino acid S₃₉ is —S₃₉—(OH).

[0340] In some embodiments, the isolated peptide further comprises a lactam bridge formed via an amide bond between the side chains of a lysine and a glutamic acid at positions X₂₁ and X₁₇, respectively. In some embodiments, the isolated peptide further comprises a lactam bridge formed via an amide bond between the side chains of a lysine and a glutamic acid at positions X₁₇ and X₂₁, respectively. In some embodiments, the isolated peptide further comprises a lactam bridge formed via an amide bond between the side chains of a lysine and a glutamic acid at positions X₂₁ and X₂₈, respectively. In some embodiments, the isolated peptide further comprises a lactam bridge formed via an amide bond between the side chains of a lysine and a glutamic acid at positions X₂₈ and X₂₁, respectively. In some embodiments, the isolated peptide further comprises a lactam bridge formed via an amide bond between the side chains of a lysine and a glutamic acid at positions X₂₀ and X₂₄, respectively. In some embodiments, the isolated peptide further comprises a lactam bridge formed via an amide bond between the side chains of a lysine and a glutamic acid at positions X₂₄ and X₂₀, respectively. In some embodiments, the isolated peptide further comprises a lactam bridge formed via an amide bond between the side chains of a lysine and a glutamic acid at positions X₁₂ and X₁₆, respectively. In some embodiments, the isolated peptide further comprises a lactam bridge formed via an amide bond between the side chains of a lysine and a glutamic acid at positions X₁₆ and X₁₂, respectively.

[0341] In some embodiments, when K is selected at position X₁₂, X₁₇, X₂₀, X₂₁, X₂₄, or X₂₈, it represents lysine optionally covalently bound to a lipophilic substituent, optionally via a spacer.

[0342] In some embodiments, when K is selected at position X₁₇, X₂₀, or X₂₁, it represents lysine optionally covalently bound to a lipophilic substituent, optionally via a spacer.

[0343] In some embodiments, only the residue at X₁₆ may be covalently bound to a lipophilic substituent, optionally via a spacer.

[0344] In certain embodiments, the present invention provides an isolated polypeptide, comprising the amino acid sequence of SEQ ID NO: 203: HX₂EGTFTX₈X₉X₁₀SX₁₂QYEX₁₆X₁₇X₁₈X₁₉X₂₀X₂₁FIX₂₄WLKX₂₈GGPX₃₂SGAPPPS-(OH/NH₂) (SEQ ID NO: 203) or a pharmaceutically acceptable salt thereof, wherein:
[0345] X₂ is 2-aminoisobutyric acid (Aib) or G;
[0346] X₈ is N or S;
[0347] X₉ is D or E;
[0348] X₁₀ is I, L, or V;
[0349] X₁₂ is E or K;
[0350] X₁₆ is K covalently bound to a lipophilic substituent, optionally via a spacer;
[0351] X₁₇ is E or K;
[0352] X₁₈ is A or Y;
[0353] X₁₉ is A or V;
[0354] X₂₀ is E, K, or R;
[0355] X₂₁ is E, K, L, or Q;
[0356] X₂₄ is E, K, or S;
[0357] X₂₈ is E, K, N, or Q; and
[0358] X₃₂ is H or S;
[0359] each K independently represents lysine optionally covalently bound to a lipophilic substituent, optionally via a spacer;
[0360] wherein the peptide optionally further comprises a lactam bridge formed via an amide bond between the side chains of a lysine and a glutamic acid at positions X₁₇ and X₂₁, respectively; at positions X₂₁ and X₁₇, respectively; at positions X₂₁ and X₂₈, respectively; at positions X₂₈ and X₂₁, respectively; at positions X₂₀ and X₂₄, respectively; or at positions X₂₄ and X₂₀, respectively.

[0361] In some embodiments, X₂ is Aib.

[0362] In some embodiments, if X₂₄ is S, then X₁₀ is V.

[0363] In some embodiments, the peptide comprises a lactam bridge formed via an amide bond between the side chains of a lysine and a glutamic acid at positions X₂₀ and X₂₄, respectively.

[0364] In some embodiments, X₂ is Aib. In some embodiments, X₂ is G.

[0365] In some embodiments, X₈ is N. In some embodiments, X₈ is S.

[0366] In some embodiments, X₉ is D. In some embodiments, X₉ is E.

[0367] In some embodiments, X₁₀ is I. In some embodiments, X₁₀ is L. In some embodiments, X₁₀ is V.

[0368] In some embodiments, X₁₂ is E. In some embodiments, X₁₂ is K.

[0369] In some embodiments, X₁₇ is E. In some embodiments, X₁₇ is K.

[0370] In some embodiments, X₁ₛ is A. In some embodiments, X₁ₛ is Y.

[0371] In some embodiments, X₁₉ is A. In some embodiments, X₁₉ is V.

[0372] In some embodiments, X₂₀ is E. In some embodiments, X₂₀ is K. In some embodiments, X₂₀ is R.

[0373] In some embodiments, X₂₁ is E. In some embodiments, X₂₁ is K. In some embodiments, X₂₁ is L. In some embodiments, X₂₁ is Q.

[0374] In some embodiments, X₂₄ is E. In some embodiments, X₂₄ is K. In some embodiments, X₂₄ is S.

[0375] In some embodiments, X₂₈ is E. In some embodiments, X₂₈ is K. In some embodiments, X₂₈ is N. In some embodiments, X₂₈ is Q.

[0376] In some embodiments, X₃₂ is H. In some embodiments, X₃₂ is S.

[0377] In some embodiments, carboxy terminal amino acid, i.e. S₃₉, is —S₃₉—(NH₂). In some embodiments, carboxy terminal amino acid S₃₉ is —S₃₉—(OH).

[0378] In some embodiments, the isolated peptide further comprises a lactam bridge formed via an amide bond between the side chains of a lysine and a glutamic acid at positions X₂₁ and X₁₇, respectively. In some embodiments, the isolated peptide further comprises a lactam bridge formed via an amide bond between the side chains of a lysine and a glutamic acid at positions X₁₇ and X₂₁, respectively. In some embodiments, the isolated peptide further comprises a lactam bridge formed via an amide bond between the side chains of a lysine and a glutamic acid at positions X₂₁ and X₂₈, respectively. In some embodiments, the isolated peptide further comprises a lactam bridge formed via an amide bond between the side chains of a lysine and a glutamic acid at positions X₂₈ and X₂₁, respectively. In some embodiments, the isolated peptide further comprises a lactam bridge formed via an amide bond between the side chains of a lysine and a glutamic acid at positions X₂₀ and X₂₄, respectively. In some embodiments, the isolated peptide further comprises a lactam bridge formed via an amide bond between the side chains of a lysine and a glutamic acid at positions X₂₄ and X₂₀, respectively.

[0379] In some embodiments, when K is selected at position X₁₂, X₁₇, X₂₀, X₂₁, X₂₄, or X₂₈, it represents lysine optionally covalently bound to a lipophilic substituent, optionally via a spacer.

[0380] In some embodiments, when K is selected at position X₁₇, X₂₀, or X₂₁, it represents lysine optionally covalently bound to a lipophilic substituent, optionally via a spacer.

[0381] In some embodiments, only the residue at X₁₆ is covalently bound to a lipophilic substituent, optionally via a spacer.

[0382] In some embodiments, certain amino acids represented by the consensus sequence of SEQ ID NO: 202 or SEQ ID NO: 203 include the following:

[0383] In some embodiments, X₂ is Aib and X₁₀ is V. In some embodiments, X₂ is Aib and X₁₄ is Y. In some embodiments, X₂ is Aib and X₁₆ is K covalently bound to a lipophilic substituent, optionally via a spacer. In some embodiments, X₂ is Aib and X₁₉ is V. In some embodiments, X₂ is Aib and X₁₉ is A. In some embodiments, X₂ is Aib and X₂₀ is R. In some embodiments, X₂ is Aib and X₂₀ is K. In some embodiments, X₂ is Aib and X₂₁ is K. In some embodiments, X₂ is Aib and X₂₁ is Q. In some embodiments, X₂ is Aib and X₂₄ is S. In some embodiments, X₂ is Aib and X₂₄ is E.

[0384] In some embodiments, X₁₀ is V and X₁₄ is Y. In some embodiments, X₁₀ is V and X₁₆ is K covalently bound to a lipophilic substituent, optionally via a spacer. In some embodiments, X₁₀ is V and X₁₉ is V. In some embodiments, X₁₀ is V and X₁₉ is A. In some embodiments, X₁₀ is V and X₂₀ is R. In some embodiments, X₁₀ is V and X₂₀ is K. In some embodiments, X₁₀ is V and X₂₁ is K. In some embodiments, X₁₀ is V and X₂₁ is Q. In some embodiments, X₁₀ is V and X₂₄ is S. In some embodiments, X₁₀ is V and X₂₄ is E.

[0385] In some embodiments, X₁₄ is Y and X₁₆ is K covalently bound to a lipophilic substituent, optionally via a spacer. In some embodiments, X₁₄ is Y and X₁₉ is V. In some embodiments, X₁₄ is Y and X₁₉ is A. In some embodiments, X₁₄ is Y and X₂₀ is R. In some embodiments, X₁₄ is Y and X₂₀ is K. In some embodiments, X₁₄ is Y and X₂₁ is K. In some embodiments, X₁₄ is Y and X₂₁ is Q. In some embodiments, X₁₄ is Y and X₂₄ is S. In some embodiments, X₁₄ is Y and X₂₄ is E.

[0386] In some embodiments, X₁₆ is K covalently bound to a lipophilic substituent, optionally via a spacer, and X₁₉ is V. In some embodiments, X₁₆ is K covalently bound to a lipophilic substituent, optionally via a spacer, and X₁₉ is A. In some embodiments, X₁₆ is K covalently bound to a lipophilic substituent, optionally via a spacer, and X₂₀ is R. In some embodiments, X₁₆ is K covalently bound to a lipophilic substituent, optionally via a spacer, and X₂₀ is K. In some embodiments, X₁₆ is K covalently bound to a lipophilic substituent, optionally via a spacer, and X₂₁ is K. In some embodiments, X₁₆ is K covalently bound to a lipophilic substituent, optionally via a spacer, and X₂₁ is Q. In some embodiments, X₁₆ is K covalently bound to a lipophilic substituent, optionally via a spacer, and X₂₄ is S. In some embodiments, X₁₆ is K covalently bound to a lipophilic substituent, optionally via a spacer, and X₂₄ is E.

[0387] In some embodiments, X₁₉ is V and X₂₀ is R. In some embodiments, X₁₉ is V and X₂₀ is K. In some embodiments, X₁₉ is V and X₂₁ is K. In some embodiments, X₁₉ is V and X₂₁ is Q. In some embodiments, X₁₉ is V and X₂₄ is S. In some embodiments, X₁₉ is V and X₂₄ is E.

[0388] In some embodiments, X₁₉ is A and X₂₀ is R. In some embodiments, X₁₉ is A and X₂₀ is K. In some embodiments, X₁₉ is A and X₂₁ is K. In some embodiments, X₁₉ is A and X₂₁ is Q. In some embodiments, X₁₉ is A and X₂₄ is S. In some embodiments, X₁₉ is A and X₂₄ is E.

[0389] In some embodiments, X₂₀ is R and X₂₁ is K. In some embodiments, X₂₀ is R and X₂₁ is Q. In some embodiments, X₂₀ is R and X₂₄ is S. In some embodiments, X₂₀ is R and X₂₄ is E.

[0390] In some embodiments, X₂₀ is K and X₂₁ is K. In some embodiments, X₂₀ is K and X₂₁ is Q. In some embodiments, X₂₀ is K and X₂₄ is S. In some embodiments, X₂₀ is K and X₂₄ is E. In some embodiments, X₂₀ is K, X₂₄ is E, and the peptide comprises a lactam bridge formed via an amide bond between the side chains of X₂₀ and X₂₄.

[0391] In some embodiments, X₂₁ is K and X₂₄ is S. In some embodiments, X₂₁ is K and X₂₄ is E.

[0392] In some embodiments, X₂₁ is Q and X₂₄ is S. In some embodiments, X₂₁ is Q and X₂₄ is E.

[0393] In some embodiments, certain amino acids represented by the consensus sequence of SEQ ID NO: 202 or SEQ ID NO: 203 include the following:

[0394] In some embodiments, X₂ is Aib, X₁₀ is V, and X₁₄ is Y. In some embodiments, X₂ is Aib, X₁₀ is V, and X₁₆ is K covalently bound to a lipophilic substituent, optionally via a spacer. In some embodiments, X₂ is Aib, X₁₀ is V, and X₁₉ is V. In some embodiments, X₂ is Aib, X₁₀ is V, and X₁₉ is A. In some embodiments, X₂ is Aib, X₁₀ is V, and X₂₀ is R. In some embodiments, X₂ is Aib, X₁₀ is V, and X₂₀ is K. In some embodiments, X₂ is Aib, X₁₀ is V, and X₂₁ is K. In some embodiments, X₂ is Aib, X₁₀ is V, and X₂₁ is Q. In some embodiments, X₂ is Aib, X₁₀ is V, and X₂₄ is S. In some embodiments, X₂ is Aib, X₁₀ is V, and X₂₄ is E.

[0395] In some embodiments, X₂ is Aib, X₁₄ is Y, and X₁₆ is K covalently bound to a lipophilic substituent, optionally via a spacer. In some embodiments, X₂ is Aib, X₁₄ is Y, and X₁₉ is V. In some embodiments, X₂ is Aib, X₁₄ is Y, and X₁₉ is A. In some embodiments, X₂ is Aib, X₁₄ is Y, and X₂₀ is R. In some embodiments, X₂ is Aib, X₁₄ is Y, and X₂₀ is K. In some embodiments, X₂ is Aib, X₁₄ is Y, and X₂₁ is K. In some embodiments, X₂ is Aib, X₁₄ is Y, and X₂₁ is Q. In some embodiments, X₂ is Aib, X₁₄ is Y, and X₂₄ is S. In some embodiments, X₂ is Aib, X₁₄ is Y, and X₂₄ is E.

[0396] In some embodiments, X₁₀ is V, X₁₄ is Y, and X₁₆ is K covalently bound to a lipophilic substituent, optionally via a spacer. In some embodiments, X₁₀ is V, X₁₄ is Y, and X₁₉ is V. In some embodiments, X₁₀ is V, X₁₄ is Y, and X₁₉ is A. In some embodiments, X₁₀ is V, X₁₄ is Y, and X₂₀ is R. In some embodiments, X₁₀ is V, X₁₄ is Y, and X₂₀ is K. In some embodiments, X₁₀ is V, X₁₄ is Y, and X₂₁ is K. In some embodiments, X₁₀ is V, X₁₄ is Y, and X₂₁ is Q. In some embodiments, X₁₀ is V, X₁₄ is Y, and X₂₄ is S. In some embodiments, X₁₀ is V, X₁₄ is Y, and X₂₄ is E.

[0397] In some embodiments, X₁₄ is Y; X₁₆ is K covalently bound to a lipophilic substituent, optionally via a spacer; and X₁₉ is V. In some embodiments, X₁₄ is Y; X₁₆ is K covalently bound to a lipophilic substituent, optionally via a spacer; and X₁₉ is A. In some embodiments, X₁₄ is Y;
[0398] X₁₆ is K covalently bound to a lipophilic substituent, optionally via a spacer; and X₂₀ is R. In some embodiments, X₁₄ is Y; X₁₆ is K covalently bound to a lipophilic substituent, optionally via a spacer; and X₂₀ is K. In some embodiments, X₁₄ is Y; X₁₆ is K covalently bound to a lipophilic substituent, optionally via a spacer; and X₂₁ is K. In some embodiments, X₁₄ is Y; X₁₆ is K covalently bound to a lipophilic substituent, optionally via a spacer; and X₂₁ is Q. In some embodiments, X₁₄ is Y; X₁₆ is K covalently bound to a lipophilic substituent, optionally via a spacer; and X₂₄ is S. In some embodiments, X₁₄ is Y; X₁₆ is K covalently bound to a lipophilic substituent, optionally via a spacer; and X₂₄ is E.

[0399] In some embodiments, X₁₄ is Y, X₁₉ is V, and X₂₁ is K. In some embodiments, X₁₄ is Y, X₁₉ is A, and X₂₁ is K. In some embodiments, X₁₄ is Y, X₂₀ is R, and X₂₁ is K. In some embodiments, X₁₄ is Y, X₂₀ is K, and X₂₁ is K. In some embodiments, X₁₄ is Y, X₂₁ is K, and X₂₄ is S. In some embodiments, X₁₄ is Y, X₂₁ is K, and X₂₄ is E.

[0400] In some embodiments, X₁₆ is K covalently bound to a lipophilic substituent, optionally via a spacer; X₁₉ is A; and X₂₀ is R. In some embodiments, X₁₆ is K covalently bound to a lipophilic substituent, optionally via a spacer; X₁₉ is A; and X₂₀ is K. In some embodiments, X₁₆ is K covalently bound to a lipophilic substituent, optionally via a spacer; X₁₉ is A; and X₂₁ is K. In some embodiments, X₁₆ is K covalently bound to a lipophilic substituent, optionally via a spacer; X₁₉ is A; and X₂₁ is Q. In some embodiments, X₁₆ is K covalently bound to a lipophilic substituent, optionally via a spacer; X₁₉ is A; and X₂₄ is S. In some embodiments, X₁₆ is K covalently bound to a lipophilic substituent, optionally via a spacer; X₁₉ is A; and X₂₄ is E.

[0401] In some embodiments, X₁₉ is V, X₂₀ is R, and X₂₁ is K. In some embodiments, X₁₉ is V, X₂₀ is R, and X₂₁ is Q. In some embodiments, X₁₉ is V, X₂₀ is R, and X₂₄ is S. In some embodiments, X₁₉ is V, X₂₀ is R, and X₂₄ is E.

[0402] In some embodiments, X₁₉ is A, X₂₀ is R, and X₂₁ is K. In some embodiments, X₁₉ is A, X₂₀ is R, and X₂₁ is Q. In some embodiments, X₁₉ is A, X₂₀ is R, and X₂₄ is S. In some embodiments, X₁₉ is A, X₂₀ is R, and X₂₄ is E.

[0403] In some embodiments, X₂₀ is R, X₂₁ is K, and X₂₄ is S. In some embodiments, X₂₀ is R, X₂₁ is K, and X₂₄ is E.

[0404] In some embodiments, X₂₀ is K, X₂₁ is K, and X₂₄ is S. In some embodiments, X₂₀ is K, X₂₁ is K, and X₂₄ is E. In some embodiments, X₂₀ is K, X₂₁ is K, X₂₄ is E, and the peptide comprises a lactam bridge formed via an amide bond between the side chains of X₂₀ and X₂₄.

[0405] In certain embodiments, the present invention provides an isolated polypeptide, comprising the amino acid sequence of SEQ ID NO: 204: HX₂EGTFTX₈DX₁₀SX₁₂QX₁₄EX₁₆X₁₇X₁₈X₁₉X₂₀X₂₁FIX₂₄WLKX₂₈GGPX₃₂SGAPPPS-(OH/NH₂) (SEQ ID NO: 204), or a pharmaceutically acceptable salt thereof, wherein:
[0406] X₂ is 2-aminoisobutyric acid (Aib) or G;
[0407] X₈ is N or S;
[0408] X₁₀ is I, L, or V;
[0409] X₁₂ is E, K, or Q;
[0410] X₁₄ is M or Y;
[0411] X₁₆ is (diaminopimelic acid) Dap covalently bound to a lipophilic substituent, optionally via a spacer, or K covalently bound to a lipophilic substituent, optionally via a spacer;
[0412] X₁₇ is E or K;
[0413] X₁₈ is A or Y;
[0414] X₁₉ is A or V;
[0415] X₂₀ is E, K, or R;
[0416] X₂₁ is E, K, L, or Q;
[0417] X₂₄ is E, K, or S;
[0418] X₂₈ is N or Q; and
[0419] X₃₂ is H or S;
[0420] wherein the peptide optionally comprises a lactam bridge formed via an amide bond between the side chains of a lysine and a glutamic acid at positions X₁₇ and X₂₁, respectively; at positions X₂₁ and X₁₇, respectively; at positions X₂₀ and X₂₄, respectively; or at positions X₂₄ and X₂₀, respectively.

[0421] In some embodiments, X₂ is Aib.

[0422] In some embodiments, if X₂₄ is S, then X₁₀ is V.

[0423] In some embodiments, X₁₄ is Y.

[0424] In some embodiments, X₁₄ is M, and X₁₆ is K covalently bound to a lipophilic substituent, optionally via a spacer.

[0425] In some embodiments, X₁₆ is K covalently bound to a lipophilic substituent, optionally via a spacer.

[0426] In some embodiments, the peptide comprises a lactam bridge formed via an amide bond between the side chains of a lysine and a glutamic acid at positions X₂₀ and X₂₄, respectively.

[0427] In some embodiments, X₂ is Aib. In some embodiments, X₂ is G.

[0428] In some embodiments, X₈ is N. In some embodiments, X₈ is S.

[0429] In some embodiments, X₁₀ is I. In some embodiments, X₁₀ is L. In some embodiments, X₁₀ is V.

[0430] In some embodiments, X₁₂ is E. In some embodiments, X₁₂ is K. In some embodiments, X₁₂ is Q.

[0431] In some embodiments, X₁₄ is M. In some embodiments, X₁₄ is Y.

[0432] In some embodiments, X₁₆ is Dap covalently bound to a lipophilic substituent, optionally via a spacer. In some embodiments, X₁₆ is K covalently bound to a lipophilic substituent, optionally via a spacer.

[0433] In some embodiments, X₁₇ is E. In some embodiments, X₁₇ is K.

[0434] In some embodiments, X₁₈ is A. In some embodiments, X₁₈ is Y.

[0435] In some embodiments, X₁₉ is A. In some embodiments, X₁₉ is V.

[0436] In some embodiments, X₂₀ is E. In some embodiments, X₂₀ is K. In some embodiments, X₂₀ is R.

[0437] In some embodiments, X₂₁ is E. In some embodiments, X₂₁ is K. In some embodiments, X₂₁ is L. In some embodiments, X₂₁ is Q.

[0438] In some embodiments, X₂₄ is E. In some embodiments, X₂₄ is K. In some embodiments, X₂₄ is S.

[0439] In some embodiments, X₂₈ is N. In some embodiments, X₂₈ is Q.

[0440] In some embodiments, X₃₂ is H. In some embodiments, X₃₂ is S.

[0441] In some embodiments, carboxy terminal amino acid, i.e. S₃₉, is —S₃₉—(NH₂). In some embodiments, carboxy terminal amino acid S₃₉ is —S₃₉—(OH).

[0442] In some embodiments, the isolated peptide further comprises a lactam bridge formed via an amide bond between the side chains of a lysine and a glutamic acid at positions X₂₁ and X₁₇, respectively. In some embodiments, the isolated peptide further comprises a lactam bridge formed via an amide bond between the side chains of a lysine and a glutamic acid at positions X₁₇ and X₂₁, respectively. In some embodiments, the isolated peptide further comprises a lactam bridge formed via an amide bond between the side chains of a lysine and a glutamic acid at positions X₂₀ and X₂₄, respectively. In some embodiments, the isolated peptide further comprises a lactam bridge formed via an amide bond between the side chains of a lysine and a glutamic acid at positions X₂₄ and X₂₀, respectively.

[0443] In some embodiments, when K is selected at position X₁₂, X₁₇, X₂₀, X₂₁, or X₂₄, it represents lysine optionally covalently bound to a lipophilic substituent, optionally via a spacer.

[0444] In some embodiments, when K is selected at position X₁₇, X₂₀, or X₂₁, it represents lysine optionally covalently bound to a lipophilic substituent, optionally via a spacer.

[0445] In some embodiments, only the residue at X₁₆ is covalently bound to a lipophilic substituent, optionally via a spacer.

[0446] In certain embodiments, the present invention provides an isolated polypeptide, comprising the amino acid sequence of SEQ ID NO: 205: HX₂EGTFTX₈DX₁₀SX₁₂QYEX₁₆X₁₇X₁₈X₁₉X₂₀X₂₁FIX₂₄WLKX₂₈GGPX₃₂SGAPPPS-(OH/NH₂) (SEQ ID NO: 205), or a pharmaceutically acceptable salt thereof, wherein:
[0447] X₂ is 2-aminoisobutyric acid (Aib) or G;
[0448] X₈ is N or S;
[0449] X₁₀ is I, L, or V;
[0450] X₁₂ is E, K, or Q;
[0451] X₁₆ is K covalently bound to a lipophilic substituent, optionally via a spacer;
[0452] X₁₇ is E or K;
[0453] X₁₈ is A or Y;
[0454] X₁₉ is A or V;
[0455] X₂₀ is E, K, or R;
[0456] X₂₁ is E, K, L, or Q;
[0457] X₂₄ is E, K, or S;
[0458] X₂₈ is N or Q; and
[0459] X₃₂ is H or S;
[0460] wherein the peptide optionally further comprises a lactam bridge formed via an amide bond between the side chains of a lysine and a glutamic acid at positions X₁₇ and X₂₁, respectively; at positions X₂₁ and X₁₇, respectively; at positions X₂₀ and X₂₄, respectively; or at positions X₂₄ and X₂₀, respectively.

[0461] In some embodiments, X₂ is Aib.

[0462] In some embodiments, if X₂₄ is S, then X₁₀ is V.

[0463] In some embodiments, the peptide comprises a lactam bridge formed via an amide bond between the side chains of a lysine and a glutamic acid at positions X₂₀ and X₂₄, respectively.

[0464] In some embodiments, X₂ is Aib. In some embodiments, X₂ is G.

[0465] In some embodiments, X₈ is N. In some embodiments, X₈ is S.

[0466] In some embodiments, X₁₀ is I. In some embodiments, X₁₀ is L. In some embodiments, X₁₀ is V.

[0467] In some embodiments, X₁₂ is E. In some embodiments, X₁₂ is K. In some embodiments, X₁₂ is Q.

[0468] In some embodiments, X₁₇ is E. In some embodiments, X₁₇ is K.

[0469] In some embodiments, X₁₈ is A. In some embodiments, X₁₈ is Y.

[0470] In some embodiments, X₁₉ is A. In some embodiments, X₁₉ is V.

[0471] In some embodiments, X₂₀ is E. In some embodiments, X₂₀ is K. In some embodiments, X₂₀ is R.

[0472] In some embodiments, X₂₁ is E. In some embodiments, X₂₁ is K. In some embodiments, X₂₁ is L. In some embodiments, X₂₁ is Q.

[0473] In some embodiments, X₂₄ is E. In some embodiments, X₂₄ is K. In some embodiments, X₂₄ is S.

[0474] In some embodiments, X₂₈ is N. In some embodiments, X₂₈ is Q.

[0475] In some embodiments, X₃₂ is H. In some embodiments, X₃₂ is S.

[0476] In some embodiments, carboxy terminal amino acid, i.e. S₃₉, is —S₃₉—(NH₂). In some embodiments, carboxy terminal amino acid S₃₉ is —S₃₉—(OH).

[0477] In some embodiments, the isolated peptide further comprises a lactam bridge formed via an amide bond between the side chains of a lysine and a glutamic acid at positions X₂₁ and X₁₇, respectively. In some embodiments, the isolated peptide further comprises a lactam bridge formed via an amide bond between the side chains of a lysine and a glutamic acid at positions X₁₇ and X₂₁, respectively. In some embodiments, the isolated peptide further comprises a lactam bridge formed via an amide bond between the side chains of a lysine and a glutamic acid at positions X₂₀ and X₂₄, respectively. In some embodiments, the isolated peptide further comprises a lactam bridge formed via an amide bond between the side chains of a lysine and a glutamic acid at positions X₂₄ and X₂₀, respectively.

[0478] In some embodiments, when K is selected at position X₁₂, X₁₇, X₂₀, X₂₁, or X₂₄, it represents lysine optionally covalently bound to a lipophilic substituent, optionally via a spacer.

[0479] In some embodiments, when K is selected at position X₁₇, X₂₀, or X₂₁, it represents lysine optionally covalently bound to a lipophilic substituent, optionally via a spacer.

[0480] In some embodiments, only the residue at X₁₆ is covalently bound to a lipophilic substituent, optionally via a spacer.

[0481] In some embodiments, certain amino acids represented by the consensus sequence of SEQ ID NO: 204 or SEQ ID NO: 205 include the following:

[0482] In some embodiments, X₂ is Aib and X₁₀ is V. In some embodiments, X₂ is Aib and X₁₄ is Y. In some embodiments, X₂ is Aib and X₁₆ is K covalently bound to a lipophilic substituent, optionally via a spacer. In some embodiments, X₂ is Aib and X₁₉ is V. In some embodiments, X₂ is Aib and X₁₉ is A. In some embodiments, X₂ is Aib and X₂₀ is R. In some embodiments, X₂ is Aib and X₂₀ is K. In some embodiments, X₂ is Aib and X₂₁ is K. In some embodiments, X₂ is Aib and X₂₁ is Q. In some embodiments, X₂ is Aib and X₂₄ is S. In some embodiments, X₂ is Aib and X₂₄ is E.

[0483] In some embodiments, X₁₀ is V and X₁₄ is Y. In some embodiments, X₁₀ is V and X₁₆ is K covalently bound to a lipophilic substituent, optionally via a spacer. In some embodiments, X₁₀ is V and X₁₉ is V. In some embodiments, X₁₀ is V and X₁₉ is A. In some embodiments, X₁₀ is V and X₂₀ is R. In some embodiments, X₁₀ is V and X₂₀ is K. In some embodiments, X₁₀ is V and X₂₁ is K. In some embodiments, X₁₀ is V and X₂₁ is Q. In some embodiments, X₁₀ is V and X₂₄ is S. In some embodiments, X₁₀ is V and X₂₄ is E.

[0484] In some embodiments, X₁₄ is Y and X₁₆ is K covalently bound to a lipophilic substituent, optionally via a spacer. In some embodiments, X₁₄ is Y and X₁₉ is V. In some embodiments, X₁₄ is Y and X₁₉ is A. In some embodiments, X₁₄ is Y and X₂₀ is R. In some embodiments, X₁₄ is Y and X₂₀ is K. In some embodiments, X₁₄ is Y and X₂₁ is K. In some embodiments, X₁₄ is Y and X₂₁ is Q. In some embodiments, X₁₄ is Y and X₂₄ is S. In some embodiments, X₁₄ is Y and X₂₄ is E.

[0485] In some embodiments, X₁₆ is K covalently bound to a lipophilic substituent, optionally via a spacer, and X₁₉ is V. In some embodiments, X₁₆ is K covalently bound to a lipophilic substituent, optionally via a spacer, and X₁₉ is A. In some embodiments, X₁₆ is K covalently bound to a lipophilic substituent, optionally via a spacer, and X₂₀ is R. In some embodiments, X₁₆ is K covalently bound to a lipophilic substituent, optionally via a spacer, and X₂₀ is K. In some embodiments, X₁₆ is K covalently bound to a lipophilic substituent, optionally via a spacer, and X₂₁ is K. In some embodiments, X₁₆ is K covalently bound to a lipophilic substituent, optionally via a spacer, and X₂₁ is Q. In some embodiments, X₁₆ is K covalently bound to a lipophilic substituent, optionally via a spacer, and X₂₄ is S. In some embodiments, X₁₆ is K covalently bound to a lipophilic substituent, optionally via a spacer, and X₂₄ is E.

[0486] In some embodiments, X₁₉ is V and X₂₀ is R. In some embodiments, X₁₉ is V and X₂₀ is K. In some embodiments, X₁₉ is V and X₂₁ is K. In some embodiments, X₁₉ is V and X₂₁ is Q. In some embodiments, X₁₉ is V and X₂₄ is S. In some embodiments, X₁₉ is V and X₂₄ is E.

[0487] In some embodiments, X₁₉ is A and X₂₀ is R. In some embodiments, X₁₉ is A and X₂₀ is K. In some embodiments, X₁₉ is A and X₂₁ is K. In some embodiments, X₁₉ is A and X₂₁ is Q. In some embodiments, X₁₉ is A and X₂₄ is S. In some embodiments, X₁₉ is A and X₂₄ is E.

[0488] In some embodiments, X₂₀ is R and X₂₁ is K. In some embodiments, X₂₀ is R and X₂₁ is Q. In some embodiments, X₂₀ is R and X₂₄ is S. In some embodiments, X₂₀ is R and X₂₄ is E.

[0489] In some embodiments, X₂₀ is K and X₂₁ is K. In some embodiments, X₂₀ is K and X₂₁ is Q. In some embodiments, X₂₀ is K and X₂₄ is S. In some embodiments, X₂₀ is K and X₂₄ is E. In some embodiments, X₂₀ is K, X₂₄ is E, and the peptide comprises a lactam bridge formed via an amide bond between the side chains of X₂₀ and X₂₄.

[0490] In some embodiments, X₂₁ is K and X₂₄ is S. In some embodiments, X₂₁ is K and X₂₄ is E.

[0491] In some embodiments, X₂₁ is Q and X₂₄ is S. In some embodiments, X₂₁ is Q and X₂₄ is E.

[0492] In some embodiments, certain amino acids represented by the consensus sequence of SEQ ID NO: 204 or SEQ ID NO: 205 include the following:

[0493] In some embodiments, X₂ is Aib, X₁₀ is V, and X₁₄ is Y. In some embodiments, X₂ is Aib, X₁₀ is V, and X₁₆ is K covalently bound to a lipophilic substituent, optionally via a spacer. In some embodiments, X₂ is Aib, X₁₀ is V, and X₁₉ is V. In some embodiments, X₂ is Aib, X₁₀ is V, and X₁₉ is A. In some embodiments, X₂ is Aib, X₁₀ is V, and X₂₀ is R. In some embodiments, X₂ is Aib, X₁₀ is V, and X₂₀ is K. In some embodiments, X₂ is Aib, X₁₀ is V, and X₂₁ is K. In some embodiments, X₂ is Aib, X₁₀ is V, and X₂₁ is Q. In some embodiments, X₂ is Aib, X₁₀ is V, and X₂₄ is S. In some embodiments, X₂ is Aib, X₁₀ is V, and X₂₄ is E.

[0494] In some embodiments, X₂ is Aib, X₁₄ is Y, and X₁₆ is K covalently bound to a lipophilic substituent, optionally via a spacer. In some embodiments, X₂ is Aib, X₁₄ is Y, and X₁₉ is V. In some embodiments, X₂ is Aib, X₁₄ is Y, and X₁₉ is A. In some embodiments, X₂ is Aib, X₁₄ is Y, and X₂₀ is R. In some embodiments, X₂ is Aib, X₁₄ is Y, and X₂₀ is K. In some embodiments, X₂ is Aib, X₁₄ is Y, and X₂₁ is K. In some embodiments, X₂ is Aib, X₁₄ is Y, and X₂₁ is Q. In some embodiments, X₂ is Aib, X₁₄ is Y, and X₂₄ is S. In some embodiments, X₂ is Aib, X₁₄ is Y, and X₂₄ is E.

[0495] In some embodiments, X₁₀ is V, X₁₄ is Y, and X₁₆ is K covalently bound to a lipophilic substituent, optionally via a spacer. In some embodiments, X₁₀ is V, X₁₄ is Y, and X₁₉ is V. In some embodiments, X₁₀ is V, X₁₄ is Y, and X₁₉ is A. In some embodiments, X₁₀ is V, X₁₄ is Y, and X₂₀ is R. In some embodiments, X₁₀ is V, X₁₄ is Y, and X₂₀ is K. In some embodiments, X₁₀ is V, X₁₄ is Y, and X₂₁ is K. In some embodiments, X₁₀ is V, X₁₄ is Y, and X₂₁ is Q. In some embodiments, X₁₀ is V, X₁₄ is Y, and X₂₄ is S. In some embodiments, X₁₀ is V, X₁₄ is Y, and X₂₄ is E.

[0496] In some embodiments, X₁₄ is Y; X₁₆ is K covalently bound to a lipophilic substituent, optionally via a spacer; and X₁₉ is V. In some embodiments, X₁₄ is Y; X₁₆ is K covalently bound to a lipophilic substituent, optionally via a spacer; and X₁₉ is A. In some embodiments, X₁₄ is Y; X₁₆ is K covalently bound to a lipophilic substituent, optionally via a spacer; and X₂₀ is R. In some embodiments, X₁₄ is Y; X₁₆ is K covalently bound to a lipophilic substituent, optionally via a spacer; and X₂₀ is K. In some embodiments, X₁₄ is Y; X₁₆ is K covalently bound to a lipophilic substituent, optionally via a spacer; and X₂₁ is K. In some embodiments, X₁₄ is Y; X₁₆ is K covalently bound to a lipophilic substituent, optionally via a spacer; and X₂₁ is Q. In some embodiments, X₁₄ is Y; X₁₆ is K covalently bound to a lipophilic substituent, optionally via a spacer; and X₂₄ is S. In some embodiments, X₁₄ is Y; X₁₆ is K covalently bound to a lipophilic substituent, optionally via a spacer; and X₂₄ is E.

[0497] In some embodiments, X₁₄ is Y, X₁₉ is V, and X₂₁ is K. In some embodiments, X₁₄ is Y, X₁₉ is A, and X₂₁ is K. In some embodiments, X₁₄ is Y, X₂₀ is R, and X₂₁ is K. In some embodiments, X₁₄ is Y, X₂₀ is K, and X₂₁ is K. In some embodiments, X₁₄ is Y, X₂₁ is K, and X₂₄ is S. In some embodiments, X₁₄ is Y, X₂₁ is K, and X₂₄ is E.

[0498] In some embodiments, X₁₆ is K covalently bound to a lipophilic substituent, optionally via a spacer; X₁₉ is A; and X₂₀ is R. In some embodiments, X₁₆ is K covalently bound to a lipophilic substituent, optionally via a spacer; X₁₉ is A; and X₂₀ is K. In some embodiments, X₁₆ is K covalently bound to a lipophilic substituent, optionally via a spacer; X₁₉ is A; and X₂₁ is K. In some embodiments, X₁₆ is K covalently bound to a lipophilic substituent, optionally via a spacer;
[0499] X₁₉ is A; and X₂₁ is Q. In some embodiments, X₁₆ is K covalently bound to a lipophilic substituent, optionally via a spacer; X₁₉ is A; and X₂₄ is S. In some embodiments, X₁₆ is K covalently bound to a lipophilic substituent, optionally via a spacer; X₁₉ is A; and X₂₄ is E.

[0500] In some embodiments, X₁₉ is V, X₂₀ is R, and X₂₁ is K. In some embodiments, X₁₉ is V, X₂₀ is R, and X₂₁ is Q. In some embodiments, X₁₉ is V, X₂₀ is R, and X₂₄ is S. In some embodiments, X₁₉ is V, X₂₀ is R, and X₂₄ is E.

[0501] In some embodiments, X₁₉ is A, X₂₀ is R, and X₂₁ is K. In some embodiments, X₁₉ is A, X₂₀ is R, and X₂₁ is Q. In some embodiments, X₁₉ is A, X₂₀ is R, and X₂₄ is S. In some embodiments, X₁₉ is A, X₂₀ is R, and X₂₄ is E.

[0502] In some embodiments, X₂₀ is R, X₂₁ is K, and X₂₄ is S. In some embodiments, X₂₀ is R, X₂₁ is K, and X₂₄ is E.

[0503] In some embodiments, X₂₀ is K, X₂₁ is K, and X₂₄ is S. In some embodiments, X₂₀ is K, X₂₁ is K, and X₂₄ is E. In some embodiments, X₂₀ is K, X₂₁ is K, X₂₄ is E, and the peptide comprises a lactam bridge formed via an amide bond between the side chains of X₂₀ and X₂₄.

[0504] In certain embodiments, the present invention provides an isolated polypeptide, comprising the amino acid sequence of SEQ ID NO: 206: HX₂EGTFTX₈DX₁₀SKQX₁₄EX₁₆EAX₁₉X₂₀X₂₁FIX₂₄WLKX₂₈GGPSSGAPPPS-(OH/NH₂) (SEQ ID NO: 206), or a pharmaceutically acceptable salt thereof, wherein:
[0505] X₂ is 2-aminoisobutyric acid (Aib) or G;
[0506] X₈ is N or S;
[0507] X₁₀ is I, L, or V;
[0508] X₁₄ is M or Y;
[0509] X₁₆ is K covalently bound to a lipophilic substituent, optionally via a spacer;
[0510] X₁₉ is A or V;
[0511] X₂₀ is E, K, or R;
[0512] X₂₁ is E, K, L, or Q;
[0513] X₂₄ is E, K, or S; and
[0514] X₂₈ is N or Q;
[0515] wherein the peptide optionally further comprises a lactam bridge formed via an amide bond between the side chains of a lysine and a glutamic acid at positions X₂₁ and X₁₇, respectively; at positions X₂₀ and X₂₄, respectively; or at positions X₂₄ and X₂₀, respectively.

[0516] In some embodiments, X₂ is Aib.

[0517] In some embodiments, if X₂₄ is S, then X₁₀ is V.

[0518] In some embodiments, X₁₄ is Y.

[0519] In some embodiments, the peptide comprises a lactam bridge formed via an amide bond between the side chains of a lysine and a glutamic acid at positions X₂₀ and X₂₄, respectively.

[0520] In some embodiments, X₂ is Aib. In some embodiments, X₂ is G.

[0521] In some embodiments, X₈ is N. In some embodiments, X₈ is S.

[0522] In some embodiments, X₁₀ is I. In some embodiments, X₁₀ is L. In some embodiments, X₁₀ is V.

[0523] In some embodiments, X₁₄ is M. In some embodiments, X₁₄ is Y.

[0524] In some embodiments, X₁₉ is A. In some embodiments, X₁₉ is V.

[0525] In some embodiments, X₂₀ is E. In some embodiments, X₂₀ is K. In some embodiments, X₂₀ is R.

[0526] In some embodiments, X₂₁ is E. In some embodiments, X₂₁ is K. In some embodiments, X₂₁ is L. In some embodiments, X₂₁ is Q.

[0527] In some embodiments, X₂₄ is E. In some embodiments, X₂₄ is K. In some embodiments, X₂₄ is S.

[0528] In some embodiments, X₂₈ is N. In some embodiments, X₂₈ is Q.

[0529] In some embodiments, carboxy terminal amino acid, i.e. S₃₉, is —S₃₉—(NH₂). In some embodiments, carboxy terminal amino acid S₃₉ is —S₃₉—(OH).

[0530] In some embodiments, the isolated peptide further comprises a lactam bridge formed via an amide bond between the side chains of a lysine and a glutamic acid at positions X₂₁ and X₁₇, respectively. In some embodiments, the isolated peptide further comprises a lactam bridge formed via an amide bond between the side chains of a lysine and a glutamic acid at positions X₁₇ and X₂₁, respectively. In some embodiments, the isolated peptide further comprises a lactam bridge formed via an amide bond between the side chains of a lysine and a glutamic acid at positions X₂₀ and X₂₄, respectively. In some embodiments, the isolated peptide further comprises a lactam bridge formed via an amide bond between the side chains of a lysine and a glutamic acid at positions X₂₄ and X₂₀, respectively.

[0531] In some embodiments, when K is selected at position X₂₀, X₂₁, or X₂₄, it represents lysine optionally covalently bound to a lipophilic substituent, optionally via a spacer.

[0532] In some embodiments, when K is selected at position X₂₀ or X₂₁, it represents lysine optionally covalently bound to a lipophilic substituent, optionally via a spacer.

[0533] In some embodiments, only the residue at X₁₆ is covalently bound to a lipophilic substituent, optionally via a spacer.

[0534] In certain embodiments, the present invention provides an isolated polypeptide, comprising the amino acid sequence of SEQ ID NO: 207: HX₂EGTFTX₈DX₁₀SKQYEX₁₆EAX₁₉X₂₀X₂₁FIX₂₄WLKX₂₈GGPSSGAPPPS-(OH/NH₂) (SEQ ID NO: 207), or a pharmaceutically acceptable salt thereof, wherein:
[0535] X₂ is 2-aminoisobutyric acid (Aib) or G;
[0536] X₈ is N or S;
[0537] X₁₀ is I, L, or V;
[0538] X₁₆ is K covalently bound to a lipophilic substituent, optionally via a spacer;
[0539] X₁₉ is A or V;
[0540] X₂₀ is E, K, or R;
[0541] X₂₁ is E, K, L, or Q;
[0542] X₂₄ is E, K, or S; and
[0543] X₂₈ is N or Q;
[0544] wherein the peptide optionally further comprises a lactam bridge formed via an amide bond between the side chains of a lysine and a glutamic acid at positions X₂₁ and X₁₇, respectively; at positions X₂₀ and X₂₄, respectively; or at positions X₂₄ and X₂₀, respectively.

[0545] In some embodiments, X₂ is Aib.

[0546] In some embodiments, if X₂₄ is S, then X₁₀ is V.

[0547] In some embodiments, the peptide comprises a lactam bridge formed via an amide bond between the side chains of a lysine and a glutamic acid at positions X₂₀ and X₂₄, respectively.

[0548] In some embodiments, X₂ is Aib. In some embodiments, X₂ is G.

[0549] In some embodiments, X₈ is N. In some embodiments, X₈ is S.

[0550] In some embodiments, X₁₀ is I. In some embodiments, X₁₀ is L. In some embodiments, X₁₀ is V.

[0551] In some embodiments, X₁₉ is A. In some embodiments, X₁₉ is V.

[0552] In some embodiments, X₂₀ is E. In some embodiments, X₂₀ is K. In some embodiments, X₂₀ is R.

[0553] In some embodiments, X₂₁ is E. In some embodiments, X₂₁ is K. In some embodiments, X₂₁ is L. In some embodiments, X₂₁ is Q.

[0554] In some embodiments, X₂₄ is E. In some embodiments, X₂₄ is K. In some embodiments, X₂₄ is S.

[0555] In some embodiments, X₂₈ is N. In some embodiments, X₂₈ is Q.

[0556] In some embodiments, carboxy terminal amino acid, i.e. S₃₉, is —S₃₉—(NH₂). In some embodiments, carboxy terminal amino acid S₃₉ is —S₃₉—(OH).

[0557] In some embodiments, the isolated peptide further comprises a lactam bridge formed via an amide bond between the side chains of a lysine and a glutamic acid at positions X₂₁ and X₁₇, respectively. In some embodiments, the isolated peptide further comprises a lactam bridge formed via an amide bond between the side chains of a lysine and a glutamic acid at positions X₁₇ and X₂₁, respectively. In some embodiments, the isolated peptide further comprises a lactam bridge formed via an amide bond between the side chains of a lysine and a glutamic acid at positions X₂₀ and X₂₄, respectively. In some embodiments, the isolated peptide further comprises a lactam bridge formed via an amide bond between the side chains of a lysine and a glutamic acid at positions X₂₄ and X₂₀, respectively.

[0558] In some embodiments, when K is selected at position X₂₀, X₂₁, or X₂₄, it represents lysine optionally covalently bound to a lipophilic substituent, optionally via a spacer.

[0559] In some embodiments, when K is selected at position X₂₀ or X₂₁, it represents lysine optionally covalently bound to a lipophilic substituent, optionally via a spacer.

[0560] In some embodiments, only the residue at X₁₆ is covalently bound to a lipophilic substituent, optionally via a spacer.

[0561] In some embodiments, certain amino acids represented by the consensus sequence of SEQ ID NO: 206 or SEQ ID NO: 207 include the following:

[0562] In some embodiments, X₂ is Aib and X₁₀ is V. In some embodiments, X₂ is Aib and X₁₄ is Y. In some embodiments, X₂ is Aib and X₁₉ is V. In some embodiments, X₂ is Aib and X₁₉ is A.

[0563] In some embodiments, X₂ is Aib and X₂₀ is R. In some embodiments, X₂ is Aib and X₂₀ is K. In some embodiments, X₂ is Aib and X₂₁ is K. In some embodiments, X₂ is Aib and X₂₁ is Q. In some embodiments, X₂ is Aib and X₂₄ is S. In some embodiments, X₂ is Aib and X₂₄ is E.

[0564] In some embodiments, X₁₀ is V and X₁₄ is Y. In some embodiments, X₁₀ is V and X₁₉ is V.

[0565] In some embodiments, X₁₀ is V and X₁₉ is A. In some embodiments, X₁₀ is V and X₂₀ is R. In some embodiments, X₁₀ is V and X₂₀ is K. In some embodiments, X₁₀ is V and X₂₁ is K. In some embodiments, X₁₀ is V and X₂₁ is Q. In some embodiments, X₁₀ is V and X₂₄ is S. In some embodiments, X₁₀ is V and X₂₄ is E.

[0566] In some embodiments, X₁₄ is Y and X₁₉ is V. In some embodiments, X₁₄ is Y and X₁₉ is A. In some embodiments, X₁₄ is Y and X₂₀ is R. In some embodiments, X₁₄ is Y and X₂₀ is K. In some embodiments, X₁₄ is Y and X₂₁ is K. In some embodiments, X₁₄ is Y and X₂₁ is Q. In some embodiments, X₁₄ is Y and X₂₄ is S. In some embodiments, X₁₄ is Y and X₂₄ is E.

[0567] In some embodiments, X₁₉ is V and X₂₀ is R. In some embodiments, X₁₉ is V and X₂₀ is K. In some embodiments, X₁₉ is V and X₂₁ is K. In some embodiments, X₁₉ is V and X₂₁ is Q. In some embodiments, X₁₉ is V and X₂₄ is S. In some embodiments, X₁₉ is V and X₂₄ is E.

[0568] In some embodiments, X₁₉ is A and X₂₀ is R. In some embodiments, X₁₉ is A and X₂₀ is K. In some embodiments, X₁₉ is A and X₂₁ is K. In some embodiments, X₁₉ is A and X₂₁ is Q. In some embodiments, X₁₉ is A and X₂₄ is S. In some embodiments, X₁₉ is A and X₂₄ is E.

[0569] In some embodiments, X₂₀ is R and X₂₁ is K. In some embodiments, X₂₀ is R and X₂₁ is Q. In some embodiments, X₂₀ is R and X₂₄ is S. In some embodiments, X₂₀ is R and X₂₄ is E.

[0570] In some embodiments, X₂₀ is K and X₂₁ is K. In some embodiments, X₂₀ is K and X₂₁ is Q. In some embodiments, X₂₀ is K and X₂₄ is S. In some embodiments, X₂₀ is K and X₂₄ is E. In some embodiments, X₂₀ is K, X₂₄ is E, and the peptide comprises a lactam bridge formed via an amide bond between the side chains of X₂₀ and X₂₄.

[0571] In some embodiments, X₂₁ is K and X₂₄ is S. In some embodiments, X₂₁ is K and X₂₄ is E.

[0572] In some embodiments, X₂₁ is Q and X₂₄ is S. In some embodiments, X₂₁ is Q and X₂₄ is E.

[0573] In some embodiments, certain amino acids represented by the consensus sequence of SEQ ID NO: 206 or SEQ ID NO: 207 include the following:

[0574] In some embodiments, X₂ is Aib, X₁₀ is V, and X₁₄ is Y. In some embodiments, X₂ is Aib, X₁₀ is V, and X₁₉ is V. In some embodiments, X₂ is Aib, X₁₀ is V, and X₁₉ is A. In some embodiments, X₂ is Aib, X₁₀ is V, and X₂₀ is R. In some embodiments, X₂ is Aib, X₁₀ is V, and X₂₀ is K. In some embodiments, X₂ is Aib, X₁₀ is V, and X₂₁ is K. In some embodiments, X₂ is Aib, X₁₀ is V, and X₂₁ is Q. In some embodiments, X₂ is Aib, X₁₀ is V, and X₂₄ is S. In some embodiments, X₂ is Aib, X₁₀ is V, and X₂₄ is E.

[0575] In some embodiments, X₂ is Aib, X₁₄ is Y, and X₁₉ is V. In some embodiments, X₂ is Aib, X₁₄ is Y, and X₁₉ is A. In some embodiments, X₂ is Aib, X₁₄ is Y, and X₂₀ is R. In some embodiments, X₂ is Aib, X₁₄ is Y, and X₂₀ is K. In some embodiments, X₂ is Aib, X₁₄ is Y, and X₂₁ is K. In some embodiments, X₂ is Aib, X₁₄ is Y, and X₂₁ is Q. In some embodiments, X₂ is Aib, X₁₄ is Y, and X₂₄ is S. In some embodiments, X₂ is Aib, X₁₄ is Y, and X₂₄ is E.

[0576] In some embodiments, X₁₀ is V, X₁₄ is Y, and X₁₉ is V. In some embodiments, X₁₀ is V, X₁₄ is Y, and X₁₉ is A. In some embodiments, X₁₀ is V, X₁₄ is Y, and X₂₀ is R. In some embodiments, X₁₀ is V, X₁₄ is Y, and X₂₀ is K. In some embodiments, X₁₀ is V, X₁₄ is Y, and X₂₁ is K. In some embodiments, X₁₀ is V, X₁₄ is Y, and X₂₁ is Q. In some embodiments, X₁₀ is V, X₁₄ is Y, and X₂₄ is S. In some embodiments, X₁₀ is V, X₁₄ is Y, and X₂₄ is E.

[0577] In some embodiments, X₁₄ is Y, X₁₉ is V, and X₂₁ is K. In some embodiments, X₁₄ is Y, X₁₉ is A, and X₂₁ is K. In some embodiments, X₁₄ is Y, X₂₀ is R, and X₂₁ is K. In some embodiments, X₁₄ is Y, X₂₀ is K, and X₂₁ is K. In some embodiments, X₁₄ is Y, X₂₁ is K, and X₂₄ is S. In some embodiments, X₁₄ is Y, X₂₁ is K, and X₂₄ is E.

[0578] In some embodiments, X₁₉ is V, X₂₀ is R, and X₂₁ is K. In some embodiments, X₁₉ is V, X₂₀ is R, and X₂₁ is Q. In some embodiments, X₁₉ is V, X₂₀ is R, and X₂₄ is S. In some embodiments, X₁₉ is V, X₂₀ is R, and X₂₄ is E.

[0579] In some embodiments, X₁₉ is A, X₂₀ is R, and X₂₁ is K. In some embodiments, X₁₉ is A, X₂₀ is R, and X₂₁ is Q. In some embodiments, X₁₉ is A, X₂₀ is R, and X₂₄ is S. In some embodiments, X₁₉ is A, X₂₀ is R, and X₂₄ is E.

[0580] In some embodiments, X₂₀ is R, X₂₁ is K, and X₂₄ is S. In some embodiments, X₂₀ is R, X₂₁ is K, and X₂₄ is E.

[0581] In some embodiments, X₂₀ is K, X₂₁ is K, and X₂₄ is S. In some embodiments, X₂₀ is K, X₂₁ is K, and X₂₄ is E. In some embodiments, X₂₀ is K, X₂₁ is K, X₂₄ is E, and the peptide comprises a lactam bridge formed via an amide bond between the side chains of X₂₀ and X₂₄.

[0582] In certain embodiments, the present invention provides an isolated polypeptide, comprising the amino acid sequence of SEQ ID NO: 208: HAibEGTFTSDX₁₀SKQYEX₁₆EAX₁₉X₂₀X₂₁FIX₂₄WLKNGGPSSGAPPPS-(OH/NH₂) (SEQ ID NO: 208), or a pharmaceutically acceptable salt thereof, wherein:
[0583] X₁₀ is L or V;
[0584] X₁₆ is K covalently bound to a lipophilic substituent, optionally via a spacer;
[0585] X₁₉ is A or V;
[0586] X₂₀ is E, K, or R;
[0587] X₂₁ is K or Q;
[0588] X₂₄ is E, K, or S; and wherein the peptide optionally further comprises a lactam bridge formed via an amide bond between the side chains of a lysine and a glutamic acid at positions X₂₁ and X₁₇, respectively; at positions X₂₀ and X₂₄, respectively; or at positions X₂₄ and X₂₀, respectively.

[0589] In some embodiments, if X₂₄ is S, then X₁₀ is V.

[0590] In some embodiments, the peptide comprises a lactam bridge formed via an amide bond between the side chains of a lysine and a glutamic acid at positions X₂₀ and X₂₄, respectively.

[0591] In some embodiments, X₁₀ is L. In some embodiments, X₁₀ is V.

[0592] In some embodiments, X₁₉ is A. In some embodiments, X₁₉ is V.

[0593] In some embodiments, X₂₀ is E. In some embodiments, X₂₀ is K. In some embodiments, X₂₀ is R.

[0594] In some embodiments, X₂₁ is K. In some embodiments, X₂₁ is Q.

[0595] In some embodiments, X₂₄ is E. In some embodiments, X₂₄ is K. In some embodiments, X₂₄ is S.

[0596] In some embodiments, carboxy terminal amino acid, i.e. S₃₉, is —S₃₉—(NH₂). In some embodiments, carboxy terminal amino acid S₃₉ is —S₃₉—(OH).

[0597] In some embodiments, the isolated peptide further comprises a lactam bridge formed via an amide bond between the side chains of a lysine and a glutamic acid at positions X₂₁ and X₁₇, respectively. In some embodiments, the isolated peptide further comprises a lactam bridge formed via an amide bond between the side chains of a lysine and a glutamic acid at positions X₂₀ and X₂₄, respectively. In some embodiments, the isolated peptide further comprises a lactam bridge formed via an amide bond between the side chains of a lysine and a glutamic acid at positions X₂₄ and X₂₀, respectively.

[0598] In some embodiments, when K is selected at position X₂₀, X₂₁, or X₂₄, it represents lysine optionally covalently bound to a lipophilic substituent, optionally via a spacer.

[0599] In some embodiments, when K is selected at position X₂₀ or X₂₁, it represents lysine optionally covalently bound to a lipophilic substituent, optionally via a spacer.

[0600] In some embodiments, only the residue at X₁₆ is covalently bound to a lipophilic substituent, optionally via a spacer.

[0601] In some embodiments, certain amino acids represented by the consensus sequence of SEQ ID NO: 208 include the following:

[0602] In some embodiments, X₁₀ is V and X₁₉ is V. In some embodiments, X₁₀ is V and X₁₉ is A. In some embodiments, X₁₀ is V and X₂₀ is R. In some embodiments, X₁₀ is V and X₂₀ is K. In some embodiments, X₁₀ is V and X₂₁ is K. In some embodiments, X₁₀ is V and X₂₁ is Q. In some embodiments, X₁₀ is V and X₂₄ is S. In some embodiments, X₁₀ is V and X₂₄ is E.

[0603] In some embodiments, X₁₉ is V and X₂₀ is R. In some embodiments, X₁₉ is V and X₂₀ is K. In some embodiments, X₁₉ is V and X₂₁ is K. In some embodiments, X₁₉ is V and X₂₁ is Q. In some embodiments, X₁₉ is V and X₂₄ is S. In some embodiments, X₁₉ is V and X₂₄ is E.

[0604] In some embodiments, X₁₉ is A and X₂₀ is R. In some embodiments, X₁₉ is A and X₂₀ is K. In some embodiments, X₁₉ is A and X₂₁ is K. In some embodiments, X₁₉ is A and X₂₁ is Q. In some embodiments, X₁₉ is A and X₂₄ is S. In some embodiments, X₁₉ is A and X₂₄ is E.

[0605] In some embodiments, X₂₀ is R and X₂₁ is K. In some embodiments, X₂₀ is R and X₂₁ is Q. In some embodiments, X₂₀ is R and X₂₄ is S. In some embodiments, X₂₀ is R and X₂₄ is E.

[0606] In some embodiments, X₂₀ is K and X₂₁ is K. In some embodiments, X₂₀ is K and X₂₁ is Q. In some embodiments, X₂₀ is K and X₂₄ is S. In some embodiments, X₂₀ is K and X₂₄ is E. In some embodiments, X₂₀ is K, X₂₄ is E, and the peptide comprises a lactam bridge formed via an amide bond between the side chains of X₂₀ and X₂₄.

[0607] In some embodiments, X₂₁ is K and X₂₄ is S. In some embodiments, X₂₁ is K and X₂₄ is E.

[0608] In some embodiments, X₂₁ is Q and X₂₄ is S. In some embodiments, X₂₁ is Q and X₂₄ is E.

[0609] In some embodiments, certain amino acids represented by the consensus sequence of SEQ ID NO: 208 include the following:

[0610] In some embodiments, X₁₀ is V, X₁₉ is V, and X₂₀ is R. In some embodiments, X₁₀ is V, X₁₉ is V, and X₂₀ is K. In some embodiments, X₁₀ is V, X₁₉ is V, and X₂₁ is K. In some embodiments, X₁₀ is V, X₁₉ is V, and X₂₁ is Q. In some embodiments, X₁₀ is V, X₁₉ is V, and X₂₄ is S. In some embodiments, X₁₀ is V, X₁₉ is V, and X₂₄ is E.

[0611] In some embodiments, X₁₀ is V, X₁₉ is V, and X₂₄ is S. In some embodiments, X₁₀ is V, X₁₉ is A, and X₂₄ is S. In some embodiments, X₁₀ is V, X₂₀ is R, and X₂₄ is S. In some embodiments, X₁₀ is V, X₂₀ is K, and X₂₄ is S. In some embodiments, X₁₀ is V, X₂₁ is K, and X₂₄ is S. In some embodiments, X₁₀ is V, X₂₁ is Q, and X₂₄ is S.

[0612] In some embodiments, X₁₉ is V, X₂₀ is R, and X₂₁ is K. In some embodiments, X₁₉ is V, X₂₀ is R, and X₂₁ is Q. In some embodiments, X₁₉ is V, X₂₀ is R, and X₂₄ is S. In some embodiments, X₁₉ is V, X₂₀ is R, and X₂₄ is E.

[0613] In some embodiments, X₁₉ is A, X₂₀ is R, and X₂₁ is K. In some embodiments, X₁₉ is A, X₂₀ is R, and X₂₁ is Q. In some embodiments, X₁₉ is A, X₂₀ is R, and X₂₄ is S. In some embodiments, X₁₉ is A, X₂₀ is R, and X₂₄ is E.

[0614] In some embodiments, X₂₀ is R, X₂₁ is K, and X₂₄ is S. In some embodiments, X₂₀ is R, X₂₁ is K, and X₂₄ is E.

[0615] In some embodiments, X₂₀ is K, X₂₁ is K, and X₂₄ is S. In some embodiments, X₂₀ is K, X₂₁ is K, and X₂₄ is E. In some embodiments, X₂₀ is K, X₂₁ is K, X₂₄ is E, and the peptide comprises a lactam bridge formed via an amide bond between the side chains of X₂₀ and X₂₄.

### Conjugation of a Lipophilic Substituent to any of the Peptides, Optionally Via a Spacer

[0616] In some embodiments, any of the disclosed polypeptides is optionally substituted with one or more lipophilic substituents each optionally via a spacer, wherein “lipophilic substituent” and “spacer” are defined herein. In some embodiments, any of the disclosed polypeptides, comprising an amino acid sequence selected from the group consisting of amino acid sequences represented by any of the consensus sequences of SEQ ID NO:1 through SEQ ID NO:162 and SEQ ID NO:1000 through SEQ ID NO:1162, either comprises one or more lipophilic substituents each optionally via a spacer, or can be modified, or further modified, by covalent attachment of one or more lipophilic substituents each optionally via a spacer. In some embodiments, the lipophilic substituent may be attached to an amino group of the polypeptide (e.g., an ε-amino group of a lysine residue) by means of a carboxyl group of the lipophilic substituent, or optionally an amino group of the spacer, wherein a carboxyl group of the spacer forms an amide bond with an ε-amino group of a lysine residue.

### Lipophilic Substituent

[0617] Conjugation of one or more “lipophilic substituents”, each optionally via a “spacer,” to any of the disclosed polypeptides of this invention is intended to prolong the action of the polypeptide by facilitating binding to serum albumin and delayed renal clearance of the conjugated polypeptide. As used herein, a “lipophilic substituent” comprises a substituent comprising 4 to 40 carbon atoms, 8 to 25 carbon atoms, 12 to 22 carbon atoms, or 6 to 20 carbon atoms. The lipophilic substituent may be attached to an amino group of the polypeptide (e.g., an ε-amino group of a lysine residue) by means of a carboxyl group of the lipophilic substituent, or optionally an amino group of the spacer, which carboxyl group of the spacer in turn forms an amide bond with an amino group of the amino acid (e.g., lysine) residue to which it is attached. In some embodiments, the polypeptide comprises three, two, or preferably one lipophilic substituent each with or without an optional spacer, which is defined in greater detail below.

[0618] In some embodiments, the lipophilic substituent comprises a straight-chain or branched alkyl group. In some embodiments, the lipophilic substituent is an acyl group of a straight-chain or branched fatty acid. In some embodiments, the lipophilic substituent is an acyl group of a straight-chain or branched fatty acid, further substituted with one or more carboxylic acid and/or hydroxamic acid groups.

[0619] In some embodiments, the polypeptide comprises three, two, or preferably one lipophilic substituents each without an optional spacer. In some embodiments, the lipophilic substituent is —CO(CH₂)₁₆CO₂H. In some embodiments, the lipophilic substituent is —CO(CH₂)₁₈CO₂H. In some embodiments, the lipophilic substituent is —CO(CH₂)₂₀CO₂H.

[0620] In some embodiments, the polypeptide comprises three, two, or preferably one lipophilic substituents each without an optional spacer. In some embodiments, the lipophilic substituent is a monovalent group of Formula I:

—CO—(CH₂)ₘ—Z Formula I
[0621] wherein
[0622] Z is —CH₃ or —CO₂H; and
[0623] m is from 4 to 24,
[0624] which lipophilic substituent forms an amide bond between an amino group (e.g., ε-amino group of a lysine) of the disclosed polypeptide and a CO— group of the lipophilic substituent.

[0625] In some embodiments, Z is —CO₂H. In some embodiments, m is from 14 to 20. In some embodiments, the lipophilic substituent is covalently bound to the isolated polypeptide via a spacer. In some embodiments, the lipophilic substituent, —CO—(CH₂)ₘ—Z, is linked to an amino group of isolated polypeptide via the spacer, wherein the spacer forms a bridge between the amino group of the isolated polypeptide and a CO— group of the lipophilic substituent.

[0626] In some embodiments, m is selected from the group consisting of 4-20, 8-20, 12-20, 14-20, 16-20, 14, 16, 18, and 20.

[0627] In some embodiments, Z is —CO₂H, and the lipophilic substituent has the formula —CO—(CH₂)ₘ—CO₂H. In some embodiments, —CO—(CH₂)ₘ—Z is selected from the group consisting of —CO—(CH₂)₄—CO₂H, —CO—(CH₂)₅—CO₂H, —CO—(CH₂)₆—CO₂H, —CO—(CH₂)₇—CO₂H, —CO—(CH₂)₈—CO₂H, —CO—(CH₂)₉—CO₂H, —CO—(CH₂)₁₀—CO₂H, —CO—(CH₂)₁₁—CO₂H, —CO—(CH₂)₁₂—CO₂H, —CO—(CH₂)₁₃—CO₂H, —CO—(CH₂)₁₄—CO₂H, —CO—(CH₂)₁₅—CO₂H, —CO—(CH₂)₁₆—CO₂H, —CO—(CH₂)₁₇—CO₂H, —CO—(CH₂)₁₈—CO₂H, —CO—(CH₂)₁₉—CO₂H, —CO—(CH₂)₂₀—CO₂H.

[0628] In some embodiments, the lipophilic substituent is —CO—(CH₂)₁₄—CO₂H. In some embodiments, the lipophilic substituent is —CO—(CH₂)₁₆—CO₂H. In some embodiments, the lipophilic substituent is —CO—(CH₂)₁₈—CO₂H. In some embodiments, the lipophilic substituent is —CO—(CH₂)₂₀—CO₂H.

[0629] In some embodiments, Z is —CH₃, and the lipophilic substituent has the formula —CO—(CH₂)ₘ—CH₃. In some embodiments, —CO—(CH₂)ₘ—Z is selected from the group consisting of —CO—(CH₂)₄—CH₃, —CO—(CH₂)₅—CH₃, —CO—(CH₂)₆—CH₃, —CO—(CH₂)₇—CH₃, —CO—(CH₂)₈—CH₃, —CO—(CH₂)₉—CH₃, —CO—(CH₂)₁₀—CH₃, —CO—(CH₂)₁₁—CH₃, —CO—(CH₂)₁₂—CH₃, —CO—(CH₂)₁₃—CH₃, —CO—(CH₂)₁₄—CH₃, —CO—(CH₂)₁₅—CH₃, —CO—(CH₂)₁₆—CH₃, —CO—(CH₂)₁₇—CH₃, —CO—(CH₂)₁₈—CH₃, —CO—(CH₂)₁₉—CH₃, and —CO—(CH₂)₂₀—CH₃.

### Lipophilic Substituent & Spacer

[0630] In some embodiments, the lipophilic substituent is attached to the parent peptide by means of a “spacer.” In some embodiments, provided herein is any of the disclosed polypeptides, comprising an amino acid sequence selected from the group consisting of amino acid sequences represented by any of the consensus sequences of SEQ ID NO:1 through SEQ ID NO:143, comprising a lipophilic substituent, wherein the lipophilic substituent is linked to the ε-amino group of a lysine via a spacer, which spacer forms a bridge between an amino group of the disclosed polypeptide and a CO— group of the lipophilic substituent.

[0631] In some embodiments, the spacer comprises one or more amino acids, for example, single amino acid such as Glu, Asp, Gly or Lys, dipeptide such as 2(Glu), Glu-Gly, or polypeptide such as 3(Glu), 4(Glu) (SEQ ID NO: 9121), 2(Glu)-Gly etc. In some embodiments, when the spacer comprises one or more amino acids, e.g., Glu, Asp, Gly or Lys, one carboxyl group of the spacer may form an amide bond with an amino group of the disclosed polypeptide, and an amino group of the spacer may form an amide bond with a carboxyl group of the lipophilic substituent.

[0632] In some embodiments, when the spacer comprises Glu or Asp, that further include a carboxylic acid-terminating sidechain, the terminal carboxyl group of the sidechain of the Glu or Asp-containing spacer may form an amide bond with an amino group of the disclosed polypeptide, and an amino group of the Glu or Asp-containing spacer may form an amide bond with a carboxyl group of the lipophilic substituent, i.e., γGlu or βAsp.

[0633] In some embodiments, the spacer is -γGlu-γGlu-dpeg-. In some embodiments, the spacer is -γGlu-γGlu-dpeg-γGlu-γGlu-. In some embodiments, the spacer is —[COCH₂(OCH₂CH₂)₂NH]₂-γGlu-.

[0634] In some embodiments, the polypeptide comprises three, two, or preferably one lipophilic substituent each with a spacer. In some non-limiting embodiments, the lipophilic substituent and spacer form a monovalent group selected from the group consisting of those listed in Table 3:

TABLE 3
representative lipophilic substituent and spacer moieties

-γGlu-γGlu-CO(CH₂)₁₆CO₂H
-γGlu-γGlu-CO(CH₂)₁₈CO₂H
-γGlu-γGlu-dpeg-CO(CH₂)₁₆CO₂H
-γGlu-γGlu-dpeg-CO(CH₂)₁₈CO₂H
-γGlu-γGlu-dpeg-γGlu-CO(CH₂)₁₆CO₂H
-γGlu-γGlu-dpeg-γGlu-CO(CH₂)₁₈CO₂H
-γGlu-γGlu-dpeg-γGlu-γGlu-CO(CH₂)₁₆CO₂H
-γGlu-γGlu-dpeg-γGlu-γGlu-CO(CH₂)₁₈CO₂H
-γGlu-γGlu-dpeg-dpeg-CO(CH₂)₁₆CO₂H
-γGlu-γGlu-dpeg-dpeg-CO(CH₂)₁₈CO₂H
-γGlu-γGlu-dpeg-dpeg-γGlu-CO(CH₂)₁₆CO₂H
-γGlu-γGlu-dpeg-dpeg-γGlu-CO(CH₂)₁₈CO₂H
-γGlu-γGlu-γGlu-CO(CH₂)₁₆CO₂H
-γGlu-γGlu-γGlu-CO(CH₂)₁₈CO₂H
-dpeg-dpeg-γGlu-CO(CH₂)₁₆CO₂H
-dpeg-dpeg-γGlu-CO(CH₂)₁₈CO₂H
-γGlu-γGlu-γGlu-dpeg-CO(CH₂)₁₆CO₂H
-γGlu-γGlu-γGlu-dpeg-CO(CH₂)₁₈CO₂H
-γGlu-dpeg-CO(CH₂)₁₆CO₂H
-γGlu-dpeg-CO(CH₂)₁₈CO₂H
-[COCH₂(OCH₂CH₂)₂NH]₂-γGlu-CO(CH₂)₁₆CO₂H

[0635] In some embodiments, the lipophilic substituent and spacer form a monovalent group of Formula II:

—(Y)ₙ—CO—(CH₂)ₘ—Z Formula II
[0636] wherein
[0637] Y is selected from the group consisting of γGlu, Asp, Lys and Gly;
[0638] Z is —CH₃ or —CO₂H;
[0639] m is from 4 to 24; and
[0640] n is from 1 to 10.

[0641] In some embodiments, Z is —CO₂H. In some embodiments, m is from 14 to 20. In some embodiments, Y is γGlu. In some embodiments, n is from 1 to 5.

[0642] In some embodiments, Y is selected from the group consisting of γGlu and Gly. In some embodiments, Y is γGlu. In some embodiments, Y is Gly.

[0643] In some embodiments, the polypeptide comprises three, two, or preferably one lipophilic substituent each with a spacer. In some embodiments, the lipophilic substituent and spacer are a monovalent group of Formula III:

—(V)ᵣ—(Y)ₙ—CO—(CH₂)ₘ—Z Formula III
[0644] wherein,
[0645] V is —[COCH₂(OCH₂CH₂)ₜNH]—;
[0646] Y is selected from the group consisting of γGlu, Asp, and Gly;
[0647] Z is —CH₃ or —CO₂H;
[0648] m is from 4 to 24;
[0649] n is from 1 to 10;
[0650] r is from 1 to 6; and
[0651] t is from 1 to 6.

[0652] In some embodiments, Z is —CO₂H. In some embodiments, Z is —CH₃.

[0653] In some embodiments, Y is γGlu. In some embodiments, Y is Asp. In some embodiments, Y is Gly.

[0654] In some embodiments, m is selected from the group consisting of 4-20, 8-20, 12-20, 14-20, 16-20, 14, 16, 18, and 20. In some embodiments, m is from 14 to 20.

[0655] In some embodiments, n is selected from the group consisting of 1, 2, 3, 4, 5, 6, 7, 8, 9 and 10. In some embodiments, n is from 1 to 5. In some embodiments, n is 1. In some embodiments, n is 2. In some embodiments, n is 3. In some embodiments, n is 4. In some embodiments, n is 5.

[0656] In some embodiments, r is from 1 to 3. In some embodiments, r is 1. In some embodiments, r is 2. In some embodiments, r is 3. In some embodiments, r is 4. In some embodiments, r is 5.

[0657] In some embodiments, t is from 1 to 3. In some embodiments, t is selected from the group consisting of 1, 2, 3, 4, 5 and 6.

[0658] In some embodiments, Y is γGlu; Z is —CO₂H; m is 16; n is 1; r is 2; and t is 2.

[0659] In an embodiment, —(V)ᵣ—(Y)ₙ— is —[COCH₂(OCH₂CH₂)₂NH]₂-γGlu-.

[0660] In some embodiments, the polypeptide comprises three, two, or preferably one lipophilic substituent each with a spacer. In some embodiments, the lipophilic substituent and spacer are a monovalent group of Formula IV:

—(Y1)ₙ₁-(dpeg)ᵣ-(Y2)ₙ₂-CO—(CH₂)ₘ—Z Formula IV

[0661] wherein
[0662] Z is —CH₃ or —CO₂H;
[0663] m is from 4 to 24;
[0664] Y1 is selected from the group consisting of γGlu, Asp, and Gly;
[0665] Y2 is selected from the group consisting of γGlu, Asp, and Gly;
[0666] dpeg is —[CO(CH₂)O(CH₂)₂O(CH₂)NH]—;
[0667] r is from 1 to 8;
[0668] n1 is from 0 to 10; and
[0669] n2 is from 0 to 10.

[0670] In some embodiments, Z is —CO₂H. In some embodiments, Z is —CH₃.

[0671] In some embodiments, m is selected from the group consisting of 4-20, 8-20, 12-20, 14-20, 16-20, 14, 16, 18, and 20. In some embodiments, m is from 14 to 20.

[0672] In some embodiments, Y1 is γGlu. In some embodiments, Y1 is Asp. In some embodiments, Y1 is Gly.

[0673] In some embodiments, Y2 is γGlu. In some embodiments, Y2 is Asp. In some embodiments, Y2 is Gly.

[0674] In some embodiments, n1 is selected from the group consisting of 0, 1, 2, 3, 4, 5, 6, 7, 8, 9 and 10. In some embodiments, n1 is from 0 to 3. In some embodiments, n1 is 0. In some embodiments, n1 is 1. In some embodiments, n1 is 2. In some embodiments, n1 is 3. In some embodiments, n1 is 4. In some embodiments, n1 is 5.

[0675] In some embodiments, n2 is selected from the group consisting of 0, 1, 2, 3, 4, 5, 6, 7, 8, 9 and 10. In some embodiments, n2 is from 0 to 3. In some embodiments, n2 is 0. In some embodiments, n2 is 1. In some embodiments, n2 is 2. In some embodiments, n2 is 3. In some embodiments, n2 is 4. In some embodiments, n2 is 5.

[0676] In some embodiments, r is from 1 to 3. In some embodiments, r is 1. In some embodiments, r is 2. In some embodiments, r is 3. In some embodiments, r is 4. In some embodiments, r is 5.

[0677] In some embodiments, r is 6. In some embodiments, r is 7. In some embodiments, r is 8.

[0678] In some embodiments, r is 1, n1 is 2, and n2 is 0.

[0679] In some embodiments, r is 1, n1 is 2, and n2 is 2.

[0680] In some embodiments, Y1 is γGlu and Y2 is γGlu.

[0681] In some embodiments, Y1 is γGlu and n2 is 0.

[0682] In some embodiments, Y1 is γGlu, r is 1, n1 is 2, and n2 is 0.

[0683] In some embodiments, —(Y1)ₙ₁-(dpeg)ᵣ-(Y2)ₙ₂- is selected from the group consisting of -γGlu-γGlu-dpeg-, -γGlu-γGlu-dpeg-γGlu-γGlu-, -γGlu-γGlu-dpeg-γGlu-, -γGlu-γGlu-dpeg-dpeg-, -γGlu-γGlu-dpeg-dpeg-γGlu-, -dpeg-dpeg-γGlu-, -γGlu-γGlu-γGlu-dpeg-, and -γGlu-dpeg-.

[0684] In some embodiments, the polypeptide comprises three, two, or preferably one lipophilic substituent each with a spacer. In some embodiments, the lipophilic substituent and spacer are a monovalent group of Formula V:

-(γGlu)ₙ-CO—(CH₂)ₘ—Z Formula V
[0685] wherein
[0686] Z is —CH₃ or —CO₂H;
[0687] m is from 4 to 24; and
[0688] n is from 1 to 10 (“(γGlu)ₙ”, where n is from 1 to 10 disclosed as SEQ ID NO: 9122).

[0689] In some embodiments, Z is —CH₃. In some embodiments, Z is —CO₂H.

[0690] In some embodiments, m is from 14 to 20.

[0691] In some embodiments, m is selected from the group consisting of 4-20, 8-20, 12-20, 14-20, 16-20, 14, 16, 18, and 20.

[0692] In some embodiments, n is selected from the group consisting of 1, 2, 3, 4, 5, 6, 7, 8, 9 and 10. In some embodiments, n is 1. In some embodiments, n is 2. In some embodiments, n is 3. In some embodiments, n is 4. In some embodiments, n is 5.

[0693] In some embodiments, the polypeptide comprises three, two, or preferably one lipophilic substituent each with a spacer. In some embodiments, the lipophilic substituent and spacer are a monovalent group of Formula VI:

-(γGlu)ₙ-(Gly)-CO—(CH₂)ₘ—Z Formula VI
[0694] wherein
[0695] Z is —CH₃ or —CO₂H;
[0696] m is from 4 to 24; and
[0697] n is from 1 to 10 (“(γGlu)ₙ”, where n is from 1 to 10 disclosed as SEQ ID NO: 9122).

[0698] In some embodiments, (γGlu)ₙ is selected from the group consisting of γGlu; 2(γGlu); 3(γGlu); 4(γGlu) (SEQ ID NO: 9123); and 5(γGlu) (SEQ ID NO: 9124). In some embodiments, -(γGlu)ₙ-(Gly)- is selected from the group consisting of 2(γGlu),Gly; and 3(γGlu),Gly (SEQ ID NO: 9125).

[0699] In some embodiments, the polypeptide comprises three, two, or preferably one lipophilic substituent each with a spacer. In some embodiments, the lipophilic substituent and spacer are a monovalent group of Formula VII:

-(Gly)-(γGlu)ₙ-(CO—(CH₂)ₘ—Z Formula VII
[0700] wherein
[0701] Z is —CH₃ or —CO₂H;
[0702] m is from 4 to 24; and
[0703] n is from 1 to 10 (“(Gly)-(γGlu)ₙ”, where n is from 1 to 10 disclosed as SEQ ID NO: 9126).

[0704] In some embodiments, certain variables represented in certain of the preceding Formulae include the following:

[0705] In some embodiments, Z is —CH₃. In some embodiments, Z is —CO₂H.

[0706] In some embodiments, m is selected from the group consisting of 4-20, 8-20, 12-20, 14-20, 16-20, 14, 16, 18, and 20.

[0707] In some embodiments, n is selected from the group consisting of 1, 2, 3, 4, 5, 6, 7, 8, 9 and 10. In some embodiments, n is 1. In some embodiments, n is 2. In some embodiments, n is 3. In some embodiments, n is 4. In some embodiments, n is 5.

[0708] In some embodiments, n is 1 and Z is —CO₂H. In some embodiments, n is 1 and Z is —CH₃. In some embodiments, n is 2 and Z is —CO₂H. In some embodiments, n is 2 and Z is —CH₃. In some embodiments, n is 3 and Z is —CO₂H. In some embodiments, n is 3 and Z is —CH₃. In some embodiments, n is 4 and Z is —CO₂H. In some embodiments, n is 4 and Z is —CH₃. In some embodiments, n is 5 and Z is —CO₂H. In some embodiments, n is 5 and Z is —CH₃.

[0709] In some embodiments, n is 1, Z is —CO₂H, and m is 14-20. In some embodiments, n is 1, Z is —CO₂H, and m is 14. In some embodiments, n is 1, Z is —CO₂H, and m is 16. In some embodiments, n is 1, Z is —CO₂H, and m is 18.

[0710] In some embodiments, n is 1, Z is —CH₃, and m is 14-20. In some embodiments, n is 1, Z is —CH₃ and m is 14. In some embodiments, n is 1, Z is —CH₃, and m is 16. In some embodiments, n is 1, Z is —CH₃, and m is 18.

[0711] In some embodiments, n is 2, Z is —CO₂H, and m is 14-20. In some embodiments, n is 2, Z is —CO₂H, and m is 14. In some embodiments, n is 2, Z is —CO₂H, and m is 16. In some embodiments, n is 2, Z is —CO₂H, and m is 18.

[0712] In some embodiments, n is 2, Z is —CH₃, and m is 14-20. In some embodiments, n is 2, Z is —CH₃ and m is 14. In some embodiments, n is 2, Z is —CH₃, and m is 16. In some embodiments,
[0713] n is 2, Z is —CH₃, and m is 18.

[0714] In some embodiments, n is 3, Z is —CO₂H, and m is 14-20. In some embodiments, n is 3, Z is —CO₂H, and m is 14. In some embodiments, n is 3, Z is —CO₂H, and m is 16. In some embodiments, n is 3, Z is —CO₂H, and m is 18.

[0715] In some embodiments, n is 3, Z is —CH₃, and m is 14-20. In some embodiments, n is 3, Z is —CH₃ and m is 14. In some embodiments, n is 3, Z is —CH₃, and m is 16. In some embodiments, n is 3, Z is —CH₃, and m is 18.

[0716] In some embodiments, n is 4, Z is —CO₂H, and m is 14-20. In some embodiments, n is 4, Z is —CO₂H, and m is 14. In some embodiments, n is 4, Z is —CO₂H, and m is 16. In some embodiments, n is 4, Z is —CO₂H, and m is 18.

[0717] In some embodiments, n is 4, Z is —CH₃, and m is 14-20. In some embodiments, n is 4, Z is —CH₃ and m is 14. In some embodiments, n is 4, Z is —CH₃, and m is 16. In some embodiments, n is 4, Z is —CH₃, and m is 18.

[0718] In some embodiments, n is 5, Z is —CO₂H, and m is 14-20. In some embodiments, n is 5, Z is —CO₂H, and m is 14. In some embodiments, n is 5, Z is —CO₂H, and m is 16. In some embodiments, n is 5, Z is —CO₂H, and m is 18.

[0719] In some embodiments, n is 5, Z is —CH₃, and m is 14-20. In some embodiments, n is 5, Z is —CH₃ and m is 14. In some embodiments, n is 5, Z is —CH₃, and m is 16. In some embodiments, n is 5, Z is —CH₃, and m is 18.

[0720] In some embodiments, the polypeptide comprises three, two, or preferably one lipophilic substituent each with a spacer. In some embodiments, the lipophilic substituent and spacer are a monovalent group of Formula VIII:

—(Y1)ₙ₁-(V)ᵣ—(Y2)ₙ₂-CO—(CH₂)ₘ—Z Formula VIII
[0721] wherein
[0722] Z is —CH₃ or —CO₂H;
[0723] m is from 4 to 24;
[0724] Y1 is selected from the group consisting of γGlu, Asp, and Gly;
[0725] Y2 is selected from the group consisting of γGlu, Asp, and Gly;
[0726] V is —[COCH₂(OCH₂CH₂)ₜNH]—;
[0727] r is from 1 to 6;
[0728] n1 is from 0 to 10;
[0729] n2 is from 0 to 10; and
[0730] t is from 1 to 6.

[0731] In some embodiments, the polypeptide comprises three, two, or preferably one lipophilic substituent each with a spacer. In some embodiments, the lipophilic substituent and spacer are a monovalent group of Formula IX:

—(Y)ₙ—(V)ᵣ—CO—(CH₂)ₘ—Z Formula IX
[0732] wherein
[0733] Z is —CH₃ or —CO₂H;
[0734] m is from 4 to 24;
[0735] Y is selected from the group consisting of γGlu, Asp, and Gly;
[0736] V is —[COCH₂(OCH₂CH₂)ₜNH]—;
[0737] r is from 1 to 6; and
[0738] n is from 1 to 10; and
[0739] t is from 1 to 6.

[0740] In some embodiments, the polypeptide comprises three, two, or preferably one lipophilic substituent each with a spacer. In some embodiments, the lipophilic substituent and spacer are a monovalent group of Formula X:

-(dpeg)ᵣ-(Y2)ₙ₂—CO—(CH₂)ₘ—Z Formula X
[0741] wherein
[0742] Z is —CH₃ or —CO₂H;
[0743] m is from 4 to 24;
[0744] dpeg is —[CO(CH₂)O(CH₂)₂O(CH₂)NH]—;
[0745] Y2 is selected from the group consisting of γGlu, Asp, and Gly;
[0746] r is from 1 to 8; and
[0747] n2 is from 0 to 10.

[0748] In some embodiments, -(dpeg)ᵣ-(Y2)ₙ₂- is selected from the group consisting of dpeg,γGlu; and dpeg,dpeg,γGlu.

[0749] In an embodiment, -(dpeg)ᵣ-(Y2)ₙ₂- is -dpeg-dpeg-γGlu-.

[0750] In some embodiments, the polypeptide comprises three, two, or preferably one lipophilic substituent each with a spacer. In some embodiments, the lipophilic substituent and spacer are a monovalent group of Formula XI:

—(Y1)ₙ₁-(dpeg)ᵣ-CO—(CH₂)ₘ—Z Formula XI
[0751] wherein
[0752] Z is —CH₃ or —CO₂H;
[0753] m is from 4 to 24;
[0754] Y1 is selected from the group consisting of γGlu, Asp, and Gly;
[0755] dpeg is —[CO(CH₂)O(CH₂)₂O(CH₂)NH]—;
[0756] r is from 1 to 8; and
[0757] n1 is from 0 to 10.

[0758] In some embodiments, Z is —CO₂H.

[0759] In some embodiments, m is selected from the group consisting of 4-20, 8-20, 12-20, 14-20, 16-20, 14, 16, 18, and 20. In some embodiments, m is from 14 to 20.

[0760] In some embodiments, Y1 is γGlu. In some embodiments, Y1 is Asp. In some embodiments, Y1 is Gly.

[0761] In some embodiments, n1 is selected from the group consisting of 0, 1, 2, 3, 4, 5, 6, 7, 8, 9 and 10. In some embodiments, n1 is from 0 to 3. In some embodiments, n1 is 0. In some embodiments, n1 is 1. In some embodiments, n1 is 2. In some embodiments, n1 is 3. In some embodiments, n1 is 4. In some embodiments, n1 is 5.

[0762] In some embodiments, r is from 1 to 3. In some embodiments, r is 1. In some embodiments, r is 2. In some embodiments, r is 3. In some embodiments, r is 4. In some embodiments, r is 5.

[0763] In some embodiments, r is 6. In some embodiments, r is 7. In some embodiments, r is 8.

[0764] In some embodiments, r is 1 and n1 is 2.

[0765] In some embodiments, Y1 is γGlu, r is 1, and n1 is 2.

[0766] In some embodiments, —(Y1)ₙ₁-(dpeg)ᵣ- is selected from the group consisting of -γGlu-γGlu-dpeg-, -γGlu-γGlu-dpeg-dpeg-, -γGlu-γGlu-γGlu-dpeg-, and -γGlu-dpeg-.

### Further Exemplary Spacers

[0767] In some embodiments, the spacer comprises a bivalent group of Formula XII:

—N(R₁)(CHR₂)ₚCO—[N(R₃)((CH₂)₂₀(CH₂)₂₀)_{q}(CH₂)CO—]ᵣ Formula XII
[0768] wherein
[0769] each R₁ and R₃ is hydrogen or C₁-C₄ alkyl;
[0770] each R₂ is H or CO₂H;
[0771] p is 1, 2, 3, 4, 5 or 6;
[0772] q is 1, 2 or 3;
[0773] r is 0 or 1,
[0774] which spacer forms a bridge between an amino group of the disclosed polypeptide and a CO— group of the lipophilic substituent.

[0775] In some embodiments, the spacer comprises a bivalent group of Formula XIII:

[—N(R₃)((CH₂)₂₀(CH₂)₂₀)_{q}(CH₂)CO-]ᵣ Formula XIII
[0776] wherein
[0777] each R₃ is hydrogen or C₁-C₄ alkyl;
[0778] q is 1, 2 or 3;
[0779] r is 0 or 1,
[0780] which spacer forms a bridge between an amino group of the disclosed polypeptide and a CO— group of the lipophilic substituent.

[0781] In some embodiments, certain variables represented in certain Formulae include the following:

[0782] In some embodiments, each R₁ is hydrogen. In some embodiments, each R₃ is hydrogen. In some embodiments, each R₁ and each R₃ are hydrogen.

[0783] In some embodiments, at least one R₂ is CO₂H. In some embodiments, one R₂ is CO₂H.

[0784] In some embodiments, p is 1. In some embodiments, p is 2. In some embodiments, p is 3. In some embodiments, p is 4. In some embodiments, p is 5. In some embodiments, p is 6.

[0785] In some embodiments, q is 1. In some embodiments, q is 2. In some embodiments, q is 3.

[0786] In some embodiments, r is 0. In some embodiments, r is 1.

[0787] In some embodiments, the spacer is γ-glutamyl, i.e., —NH(CHCO₂H)(CH₂)₂CO—. In some embodiments, the spacer is γ-aminobutanoyl, i.e., —NH(CH₂)₃CO—. In some embodiments, the spacer is β-asparagyl, i.e., —NH(CHCO₂H)(CH₂)CO—. In some embodiments, the spacer is —NH(CH₂)₂CO—. In some embodiments, the spacer is glycyl. In some embodiments, the spacer is β-alanyl.

[0788] In some embodiments, the spacer is —NHCH(CO₂H)(CH₂)₂CO—[N(R₃)((CH₂)₂₀(CH₂)₂₀)_{q}(CH₂)CO—]ᵣ. In some embodiments, the spacer is —NH(CH₂)₃CO—[N(R₃)((CH₂)₂₀(CH₂)₂₀)_{q}(CH₂)CO-]ᵣ. In some embodiments, the spacer is —NHCH(CO₂H)(CH₂)₂CO—NH((CH₂)₂O(CH₂)₂₀)₂(CH₂)CO—. In some embodiments, the spacer is —NH(CH₂)₃CO—NH((CH₂)₂O(CH₂)₂₀)₂(CH₂)CO—. In some embodiments, the spacer is —NHCH(CO₂H)CH₂CO—[N(R₃)((CH₂)₂₀(CH₂)₂₀)_{q}(CH₂)CO—]ᵣ. In some embodiments, the spacer is —NH(CH₂)₂CO—[N(R₃)((CH₂)₂₀(CH₂)₂₀)_{q}(CH₂)CO—]ᵣ.

[0789] In some embodiments, the spacer comprises a bivalent group of Formula XIV:

—(Y)ₙ— Formula XIV
[0790] wherein
[0791] Y is selected from the group consisting of γGlu, Asp, Lys and Gly;
[0792] n is from 1 to 10.

[0793] In some embodiments, Y is selected from the group consisting of γGlu and Gly. In some embodiments, Y is γGlu. In some embodiments, Y is Gly.

[0794] In some embodiments, the spacer forms a bridge between an amino group of the disclosed polypeptide and a CO— group of a lipophilic substituent. In some embodiments, one end of the spacer forms a covalent bond with an amino group of the disclosed polypeptide and the other end of the spacer forms a covalent bond with a hydrogen atom or a protecting group.

[0795] In some embodiments, the spacer comprises a bivalent group of Formula XV:

-(γGlu)ₙ- Formula XV
[0796] wherein
[0797] n is from 1 to 10 (“(γGlu)ₙ”, where n is from 1 to 10 disclosed as SEQ ID NO: 9122).

[0798] In some embodiments, n is selected from the group consisting of 1, 2, 3, 4, 5, 6, 7, 8, 9 and 10. In some embodiments, n is 1. In some embodiments, n is 2. In some embodiments, n is 3. In some embodiments, n is 4. In some embodiments, n is 5.

[0799] In some embodiments, the spacer forms a bridge between an amino group of the disclosed polypeptide and a CO— group of a lipophilic substituent. In some embodiments, one end of the spacer forms a covalent bond with an amino group of the disclosed polypeptide and the other end of the spacer forms a covalent bond with a hydrogen atom or a protecting group.

[0800] In some embodiments, the spacer comprises a bivalent group of Formula XVI:

-(γGlu)ₙ-(Gly)- Formula XVI
[0801] wherein
[0802] n is from 1 to 10 (“(γGlu)ₙ-(Gly)”, where n is from 1 to 10 disclosed as SEQ ID NO: 9127).

[0803] In some embodiments, (γGlu)ₙ is selected from the group consisting of γGlu; 2(γGlu); 3(γGlu); 4(γGlu) (SEQ ID NO: 9123); and 5(γGlu) (SEQ ID NO: 9124). In some embodiments, -(γGlu)ₙ-(Gly)- is selected from the group consisting of 2(γGlu),Gly; and 3(γGlu),Gly (SEQ ID NO: 9125).

[0804] In some embodiments, the spacer forms a bridge between an amino group of the disclosed polypeptide and a CO— group of a lipophilic substituent. In some embodiments, one end of the spacer forms a covalent bond with an amino group of the disclosed polypeptide and the other end of the spacer forms a covalent bond with a hydrogen atom or a protecting group.

[0805] In some embodiments, the spacer comprises a bivalent group of Formula XVII:

-(Gly)-(γGlu)ₙ- Formula XVII

wherein
[0806] n is from 1 to 10 (“(Gly)-(γGlu)ₙ”, where n is from 1 to 10 disclosed as SEQ ID NO: 9126).

[0807] In some embodiments, the spacer forms a bridge between an amino group of the disclosed polypeptide and a CO— group of a lipophilic substituent. In some embodiments, one end of the spacer forms a covalent bond with an amino group of the disclosed polypeptide and the other end of the spacer forms a covalent bond with a hydrogen atom or a protecting group.

[0808] In some embodiments, n is selected from the group consisting of 1, 2, 3, 4, 5, 6, 7, 8, 9 and 10. In some embodiments, n is 1. In some embodiments, n is 2. In some embodiments, n is 3. In some embodiments, n is 4. In some embodiments, n is 5.

[0809] In some embodiments, the spacer comprises a bivalent group of Formula XVIII:

—(V)ᵣ—(Y)ₙ— Formula XVIII
[0810] wherein
[0811] Y is selected from the group consisting of γGlu, Asp, and Gly;
[0812] V is —[COCH₂(OCH₂CH₂)ₜNH]—;
[0813] r is from 1 to 6;
[0814] n is from 1 to 10; and
[0815] t is from 1 to 6.

[0816] In some embodiments, Y is γGlu. In some embodiments, Y is Asp. In some embodiments, Y is Gly.

[0817] In some embodiments, n is selected from the group consisting of 1, 2, 3, 4, 5, 6, 7, 8, 9 and 10. In some embodiments, n is from 1 to 5. In some embodiments, n is 1. In some embodiments, n is 2. In some embodiments, n is 3. In some embodiments, n is 4. In some embodiments, n is 5.

[0818] In some embodiments, r is from 1 to 3. In some embodiments, r is 1. In some embodiments, r is 2. In some embodiments, r is 3. In some embodiments, r is 4. In some embodiments, r is 5.

[0819] In some embodiments, t is from 1 to 3. In some embodiments, t is selected from the group consisting of 1, 2, 3, 4, 5 and 6.

[0820] In an embodiment, —(V)ᵣ—(Y)ₙ— is —[COCH₂(OCH₂CH₂)₂NH]₂-γGlu-.

[0821] In some embodiments, the spacer forms a bridge between an amino group of the disclosed polypeptide and a CO— group of a lipophilic substituent. In some embodiments, one end of the spacer forms a covalent bond with an amino group of the disclosed polypeptide and the other end of the spacer forms a covalent bond with a hydrogen atom or a protecting group.

[0822] In some embodiments, the spacer comprises a bivalent group of Formula XIX:

—(Y1)ₙ₁-(dpeg)ᵣ-(Y2)ₙ₂— Formula XIX
[0823] wherein
[0824] Y1 is selected from the group consisting of γGlu, Asp, and Gly;
[0825] Y2 is selected from the group consisting of γGlu, Asp, and Gly;
[0826] dpeg is —[CO(CH₂)O(CH₂)₂O(CH₂)NH]—;
[0827] r is from 1 to 8;
[0828] n1 is from 0 to 10; and
[0829] n2 is from 0 to 10.

[0830] In some embodiments, Y1 is γGlu. In some embodiments, Y1 is Asp. In some embodiments, Y1 is Gly.

[0831] In some embodiments, Y2 is γGlu. In some embodiments, Y2 is Asp. In some embodiments, Y2 is Gly.

[0832] In some embodiments, n1 is selected from the group consisting of 0, 1, 2, 3, 4, 5, 6, 7, 8, 9 and 10. In some embodiments, n1 is from 0 to 3. In some embodiments, n1 is 0. In some embodiments, n1 is 1. In some embodiments, n1 is 2. In some embodiments, n1 is 3. In some embodiments, n1 is 4. In some embodiments, n1 is 5.

[0833] In some embodiments, n2 is selected from the group consisting of 0, 1, 2, 3, 4, 5, 6, 7, 8, 9 and 10. In some embodiments, n2 is from 0 to 3. In some embodiments, n2 is 0. In some embodiments, n2 is 1. In some embodiments, n2 is 2. In some embodiments, n2 is 3. In some embodiments, n2 is 4. In some embodiments, n2 is 5.

[0834] In some embodiments, r is from 1 to 3. In some embodiments, r is 1. In some embodiments, r is 2. In some embodiments, r is 3. In some embodiments, r is 4. In some embodiments, r is 5.

[0835] In some embodiments, r is 6. In some embodiments, r is 7. In some embodiments, r is 8.

[0836] In some embodiments, r is 1, n1 is 2, and n2 is 0.

[0837] In some embodiments, r is 1, n1 is 2, and n2 is 2.

[0838] In some embodiments, Y1 is γGlu and Y2 is γGlu.

[0839] In some embodiments, Y1 is γGlu and n2 is 0.

[0840] In some embodiments, Y1 is γGlu, r is 1, n1 is 2, and n2 is 0.

[0841] In some embodiments, —(Y1)ₙ₁-(dpeg)ᵣ-(Y2)ₙ₂- is selected from the group consisting of -γGlu-γGlu-dpeg-, -γGlu-γGlu-dpeg-γGlu-γGlu-, -γGlu-γGlu-dpeg-γGlu-, -γGlu-γGlu-dpeg-dpeg-, -γGlu-γGlu-dpeg-dpeg-γGlu-, -dpeg-dpeg-γGlu-, -γGlu-γGlu-γGlu-dpeg-, and -γGlu-dpeg-.

[0842] In some embodiments, the spacer forms a bridge between an amino group of the disclosed polypeptide and a CO— group of a lipophilic substituent. In some embodiments, one end of the spacer forms a covalent bond with an amino group of the disclosed polypeptide and the other end of the spacer forms a covalent bond with a hydrogen atom or a protecting group.

[0843] Accordingly, in some embodiments, an isolated polypeptide provided herein comprises an amino acid sequence, or a pharmaceutically acceptable salt thereof, selected from the group consisting of amino acid sequences represented by a consensus sequence selected from the group consisting of SEQ ID NO: 1000 to SEQ ID NO: 1162, wherein the isolated peptide further comprises a lipophilic substituent, and optionally comprises a spacer.

[0844] In some embodiments, an isolated polypeptide provided herein comprises an amino acid sequence, or a pharmaceutically acceptable salt thereof, selected from the group consisting of amino acid sequences represented by a consensus sequence selected from the group consisting of SEQ ID NO: 1000 to SEQ ID NO: 1162, wherein the isolated peptide further comprises a lipophilic substituent of Formula I.

[0845] In some embodiments, an isolated polypeptide provided herein comprises an amino acid sequence, or a pharmaceutically acceptable salt thereof, selected from the group consisting of amino acid sequences represented by a consensus sequence selected from the group consisting of SEQ ID NO: 1000 to SEQ ID NO: 1162, wherein the isolated peptide further comprises a lipophilic substituent of Formula I and a spacer selected from the group consisting of those described by Formula XII, XIII, XIV, XV, XVI, XVII, XVIII, and XIX.

[0846] In some embodiments, an isolated polypeptide provided herein comprises an amino acid sequence, or a pharmaceutically acceptable salt thereof, selected from the group consisting of amino acid sequences represented by a consensus sequence selected from the group consisting of SEQ ID NO: 1000 to SEQ ID NO: 1162, wherein the isolated peptide further comprises a lipophilic substituent and a spacer selected from the group consisting of those described by Formula I, II, III, IV, V, VI, VII, VIII, IX, X, and XI.

[0847] In some embodiments, an isolated polypeptide provided herein comprises an amino acid sequence, or a pharmaceutically acceptable salt thereof, selected from the group consisting of amino acid sequences represented by a consensus sequence selected from the group consisting of SEQ ID NO: 1000 to SEQ ID NO: 1162, wherein the isolated peptide further comprises a lipophilic substituent and a spacer selected from the group consisting of those described by Formula I.

[0848] In some embodiments, an isolated polypeptide provided herein comprises an amino acid sequence, or a pharmaceutically acceptable salt thereof, selected from the group consisting of amino acid sequences represented by a consensus sequence selected from the group consisting of SEQ ID NO: 1000 to SEQ ID NO: 1162, wherein the isolated peptide further comprises a lipophilic substituent and a spacer selected from the group consisting of those described by Formula II.

[0849] In some embodiments, an isolated polypeptide provided herein comprises an amino acid sequence, or a pharmaceutically acceptable salt thereof, selected from the group consisting of amino acid sequences represented by a consensus sequence selected from the group consisting of SEQ ID NO: 1000 to SEQ ID NO: 1162, wherein the isolated peptide further comprises a lipophilic substituent and a spacer selected from the group consisting of those described by Formula III.

[0850] In some embodiments, an isolated polypeptide provided herein comprises an amino acid sequence, or a pharmaceutically acceptable salt thereof, selected from the group consisting of amino acid sequences represented by a consensus sequence selected from the group consisting of SEQ ID NO: 1000 to SEQ ID NO: 1162, wherein the isolated peptide further comprises a lipophilic substituent and a spacer selected from the group consisting of those described by Formula IV.

[0851] As used herein, (γGlu)₂ and 2(γGlu) both mean -(γGlu)-(γGlu)- or —CO(CH₂)₂CH(CO₂H)NH—CO(CH₂)₂CH(CO₂H)NH—; (γGlu)₃ and 3(γGlu) both mean -(γGlu)-(γGlu)-(γGlu)- or —CO(CH₂)₂CH(CO₂H)NH—CO(CH₂)₂CH(CO₂H)NH—CO(CH₂)₂CH(CO₂H)NH—; etc.; where a variable is present more than once in a given formula, each occurrence of that variable is independently determined. For example, for group —(Y)₃—, where Y may be γGlu, Asp, Lys, or Gly, each Y is independently selected to be one of the four amino acids. Accordingly, by non-limiting example, —(Y)₃— may be -(γGlu)-(γGlu)-(γGlu)-, -(γGlu)-(Asp)-(γGlu)-, -(Gly)-(Asp)-(γGlu)-, or -(Gly)-(γGlu)-(γGlu)-.

### Bridging Moiety

[0852] In some embodiments, any of the disclosed polypeptides is optionally substituted with one or more bridging moieties. As used herein, the term “bridging moiety” means a covalent bond or any bivalent linker or moiety that joins two sidechains of two separate amino acid residues. In some embodiments, any of the disclosed polypeptides is optionally substituted with one or more lactam bridging moieties. As used herein, the term “lactam bridging moiety” means a lactam bridge or lactam bond that joins amino-containing and carboxy-containing sidechains of two separate amino acid residues.

### Exemplary Compounds: GLP-1 Receptor Agonist Polypeptides

[0853] In some embodiments, an isolated polypeptide of the disclosure comprises an amino acid sequence selected from the group consisting of the following peptides listed in Table 4:

TABLE 4
Exemplary compounds: GLP-1 receptor agonist polypeptides covalently
bound to a lipophilic substituent, optionally via a spacer

| Compound | | SEQ ID |
|---|---|---|
| No. | Sequence | NO: |
| A1 | HGEGTFTSDLSKQK*(dpeg-dpeg-γGlu- | SEQ ID |
| | CO(CH₂)₁₆CO₂H)EEEAVRLFIEWLKNGGPSSGAPPPS-(NH₂) | NO: 1 |
| A2 | HGEGTFTSDLSKQMEEK*(dpeg-dpeg-γGlu- | SEQ ID |
| | CO(CH₂)₁₆CO₂H)AVRLFIEWLKNGGPSSGAPPPS-(NH₂) | NO: 2 |
| A3 | HGEGTFTSDLSKQMEEEK*(dpeg-dpeg-γGlu- | SEQ ID |
| | CO(CH₂)₁₆CO₂H)VRLFIEWLKNGGPSSGAPPPS-(NH₂) | NO: 3 |
| A4 | HGEGTFTSDLSKQMEEEAVK*(dpeg-dpeg-γGlu- | SEQ ID |
| | CO(CH₂)₁₆CO₂H)LFIEWLKNGGPSSGAPPPS-(NH₂) | NO: 4 |
| A5 | HGEGTFTSDLSKQMEEEAVRK*(dpeg-dpeg-γGlu- | SEQ ID |
| | CO(CH₂)₁₆CO₂H)FIEWLKNGGPSSGAPPPS-(NH₂) | NO: 5 |
| A6 | HGEGTFTSDLSKQMEK*(dpeg-dpeg-γGlu- | SEQ ID |
| | CO(CH₂)₁₆CO₂H)EAVRLFIEWLKNGGPSSGAPPPS-(NH₂) | NO: 6 |
| A7 | HGEGTFTSDLSKQMEK*(γGlu-γGlu- | SEQ ID |
| | CO(CH₂)₁₈CO₂H)EAVRLFIEWLKNGGPSSGAPPPS-(NH₂) | NO: 7 |
| A8 | HGEGTFTSDLSKQMEK*(γGlu-γGlu- | SEQ ID |
| | CO(CH₂)₁₆CO₂H)EAVRLFIEWLKNGGPSSGAPPPS-(NH₂) | NO: 8 |
| A9 | HGEGTFTSDLSKQMEK*(γGlu-γGlu-dpeg- | SEQ ID |
| | CO(CH₂)₁₈CO₂H)EAVRLFIEWLKNGGPSSGAPPPS-(NH₂) | NO: 9 |
| A10 | HGEGTFTSDLSKQMEK*(γGlu-γGlu-dpeg- | SEQ ID |
| | CO(CH₂)₁₆CO₂H)EAVRLFIEWLKNGGPSSGAPPPS-(NH₂) | NO: 10 |
| A11 | HGEGTFTSDLSKQMEK*(dpeg-dpeg-γGlu- | SEQ ID |
| | CO(CH₂)₁₈CO₂H)EAVRLFIEWLKNGGPSSGAPPPS-(NH₂) | NO: 11 |
| A12 | HGEGTFTSDLSKQMEk*(dpeg-dpeg-γGlu- | SEQ ID |
| | CO(CH₂)₁₈CO₂H)EAVRLFIEWLKNGGPSSGAPPPS-(NH₂) | NO: 12 |
| A13 | HGEGTFTSDLSKQLEK*(γGlu-γGlu- | SEQ ID |
| | CO(CH₂)₁₈CO₂H)EAVRLFIEWLKNGGPSSGAPPPS-(NH₂) | NO: 13 |
| A14 | HGEGTFTSDLSKQFEK*(γGlu-γGlu- | SEQ ID |
| | CO(CH₂)₁₈CO₂H)EAVRLFIEWLKNGGPSSGAPPPS-(NH₂) | NO: 14 |
| A15 | HGEGTFTSDLSKQYEK*(γGlu-γGlu- | SEQ ID |
| | CO(CH₂)₁₈CO₂H)EAVRLFIEWLKNGGPSSGAPPPS-(NH₂) | NO: 15 |
| A16 | HGEGTFTSDLSKQQEK*(γGlu-γGlu- | SEQ ID |
| | CO(CH₂)₁₈CO₂H)EAVRLFIEWLKNGGPSSGAPPPS-(NH₂) | NO: 16 |
| A17 | HGEGTFTSDLSKYMEK*(γGlu-γGlu- | SEQ ID |
| | CO(CH₂)₁₈CO₂H)EAVRLFIEWLKNGGPSSGAPPPS-(NH₂) | NO: 17 |
| A18 | HGEGTFTSDLSKEMEK*(γGlu-γGlu- | SEQ ID |
| | CO(CH₂)₁₈CO₂H)EAVRLFIEWLKNGGPSSGAPPPS-(NH₂) | NO: 18 |
| A19 | HGEGTFTSDLSKKMEK*(γGlu-γGlu- | SEQ ID |
| | CO(CH₂)₁₈CO₂H)EAVRLFIEWLKNGGPSSGAPPPS-(NH₂) | NO: 19 |
| A20 | HGEGTFTSDLSKSMEK*(γGlu-γGlu- | SEQ ID |
| | CO(CH₂)₁₈CO₂H)EAVRLFIEWLKNGGPSSGAPPPS-(NH₂) | NO: 20 |
| A21 | HAEGTFTSDLSKQMEK*(γGlu-γGlu-dpeg- | SEQ ID |
| | CO(CH₂)₁₈CO₂H)EAVRLFIEWLKNGGPSSGAPPPS-(NH₂) | NO: 21 |
| A22 | H(Aib)EGTFTSDLSKQMEK*(γGlu-γGlu-dpeg- | SEQ ID |
| | CO(CH₂)₁₈CO₂H)EAVRLFIEWLKNGGPSSGAPPPS-(NH₂) | NO: 22 |
| A23 | HA(n-methyl-E)GTFTSDLSKQMEK*(γGlu-γGlu-dpeg- | SEQ ID |
| | CO(CH₂)₁₈CO₂H)EAVRLFIEWLKNGGPSSGAPPPS-(NH₂) | NO: 23 |
| A24 | HGEGTFTSDLSKQMEK*(γGlu-γGlu-dpeg-γGlu- | SEQ ID |
| | CO(CH₂)₁₆CO₂H)EAVRLFIEWLKNGGPSSGAPPPS-(NH₂) | NO: 24 |
| A25 | HGEGTFTSDLSKQMEK*(γGlu-γGlu-γGlu-dpeg- | SEQ ID |
| | CO(CH₂)₁₆CO₂H)EAVRLFIEWLKNGGPSSGAPPPS-(NH₂) | NO: 25 |
| A26 | HGEGTFTSDLSKQMEK*(γGlu-γGlu-dpeg-dpeg- | SEQ ID |
| | CO(CH₂)₁₆CO₂H)EAVRLFIEWLKNGGPSSGAPPPS-(NH₂) | NO: 26 |
| A27 | HGEGTFTSDLSKQYEK*(γGlu-γGlu-dpeg- | SEQ ID |
| | CO(CH₂)₁₈CO₂H)EAVRLFIAWLKNGGPSSGAPPPS-(NH₂) | NO: 27 |
| A28 | HGEGTFTSDLSKQYEK*(γGlu-γGlu-dpeg- | SEQ ID |
| | CO(CH₂)₁₈CO₂H)EAVRLFISWLKNGGPSSGAPPPS-(NH₂) | NO: 28 |
| A29 | HGEGTFTSDLSKQYEK*(γGlu-γGlu-dpeg- | SEQ ID |
| | CO(CH₂)₁₈CO₂H)EAVRLFIKWLKNGGPSSGAPPPS-(NH₂) | NO: 29 |
| A30 | HGEGTFTSDLSKQYEK*(γGlu-γGlu-dpeg- | SEQ ID |
| | CO(CH₂)₁₈CO₂H)EAVRLFIQWLKNGGPSSGAPPPS-(NH₂) | NO: 30 |
| A31 | HGEGTFTSDLSKQYEK*(γGlu-γGlu-dpeg- | SEQ ID |
| | CO(CH₂)₁₈CO₂H)EAVRLFIYWLKNGGPSSGAPPPS-(NH₂) | NO: 31 |
| A32 | HGEGTFTSDLSKQYEK*(γGlu-γGlu-dpeg- | SEQ ID |
| | CO(CH₂)₁₈CO₂H)EAVRLFI(Aib)WLKNGGPSSGAPPPS-(NH₂) | NO: 32 |
| A33 | HGEGTFTSDLSKQMEK*(γGlu-γGlu-dpeg-γGlu- | SEQ ID |
| | CO(CH₂)₁₈CO₂H)EAVRLFIEWLKNGGPSSGAPPPS-(NH₂) | NO: 33 |
| A34 | HGEGTFTSDLSKQMEK*(γGlu-γGlu-dpeg-dpeg-γGlu- | SEQ ID |
| | CO(CH₂)₁₆CO₂H)EAVRLFIEWLKNGGPSSGAPPPS-(NH₂) | NO: 34 |
| A35 | HGEGTFTSDLSKQMEK*(γGlu-γGlu-dpeg-dpeg-γGlu- | SEQ ID |
| | CO(CH₂)₁₈CO₂H)EAVRLFIEWLKNGGPSSGAPPPS-(NH₂) | NO: 35 |
| A36 | HGEGTFTSDLSKQMEK*(γGlu-γGlu-dpeg-γGlu-γGlu- | SEQ ID |
| | CO(CH₂)₁₆CO₂H)EAVRLFIEWLKNGGPSSGAPPPS-(NH₂) | NO: 36 |
| A37 | HGEGTFTSDLSKQMEK*(γGlu-γGlu-dpeg-γGlu-γGlu- | SEQ ID |
| | CO(CH₂)₁₈CO₂H)EAVRLFIEWLKNGGPSSGAPPPS-(NH₂) | NO: 37 |
| A38 | HGEGTFTSDLSKQMEK*(γGlu-γGlu-dpeg-dpeg- | SEQ ID |
| | CO(CH₂)₁₈CO₂H)EAVRLFIEWLKNGGPSSGAPPPS-(NH₂) | NO: 38 |
| A39 | HGEGTFTSDLSKQYEK*(γGlu-γGlu-dpeg- | SEQ ID |
| | CO(CH₂)₁₈CO₂H)EAVREFIEWLKNGGPSSGAPPPS-(NH₂) | NO: 39 |
| A40 | HGEGTFTSDLSKQYEK*(γGlu-γGlu-dpeg- | SEQ ID |
| | CO(CH₂)₁₈CO₂H)EAVRYFIEWLKNGGPSSGAPPPS-(NH₂) | NO: 40 |
| A41 | HGEGTFTSDLSKQYEK*(γGlu-γGlu-dpeg- | SEQ ID |
| | CO(CH₂)₁₈CO₂H)EAVRQFIEWLKNGGPSSGAPPPS-(NH₂) | NO: 41 |
| A42 | HGEGTFTSDLSKQYEK*(γGlu-γGlu-dpeg- | SEQ ID |
| | CO(CH₂)₁₈CO₂H)EAVRKFIEWLKNGGPSSGAPPPS-(NH₂) | NO: 42 |
| A43 | HGEGTFTSDLSKQYEK*(γGlu-γGlu-dpeg- | SEQ ID |
| | CO(CH₂)₁₈CO₂H)EAVR(Aib)FIEWLKNGGPSSGAPPPS-(NH₂) | NO: 43 |
| A44 | HGEGTFTSDLSKQYEK*(γGlu-γGlu-dpeg- | SEQ ID |
| | CO(CH₂)₁₈CO₂H)EAVRHFIEWLKNGGPSSGAPPPS-(NH₂) | NO: 44 |
| A45 | H(Aib)EGTFTSDLSKQYEK*(γGlu-γGlu-dpeg- | SEQ ID |
| | CO(CH₂)₁₈CO₂H)EAVRLFISWLKNGGPSSGAPPPS-(NH₂) | NO: 45 |
| A46 | H(Aib)EGTFTSDLSKQYEK*(γGlu-γGlu-dpeg- | SEQ ID |
| | CO(CH₂)₁₈CO₂H)EAVRLFIEWLKNGGPSSGAPPPS-(NH₂) | NO: 46 |
| A47 | HGEGTFTSELSKQYEK*(γGlu-γGlu-dpeg- | SEQ ID |
| | CO(CH₂)₁₈CO₂H)EAVRLFIEWLKNGGPSSGAPPPS-(NH₂) | NO: 47 |
| A48 | HGEGTFTSDLSKQYEK*(γGlu-γGlu-dpeg- | SEQ ID |
| | CO(CH₂)₁₈CO₂H)EAAKLFISWLKNGGPSSGAPPPS-(NH₂) | NO: 48 |
| A49 | HGEGTFTSDLSKQYEK*(γGlu-γGlu-dpeg- | SEQ ID |
| | CO(CH₂)₁₈CO₂H)EAARLFISWLKNGGPSSGAPPPS-(NH₂) | NO: 49 |
| A50 | HGEGTFTSDLSKQYEK*(γGlu-γGlu-dpeg- | SEQ ID |
| | CO(CH₂)₁₈CO₂H)EAVRLFISWLKNGGPDapSGAPPPS-(NH₂) | NO: 50 |
| A51 | HGEGTFTSDLSKQYEK*(γGlu-γGlu-dpeg- | SEQ ID |
| | CO(CH₂)₁₈CO₂H)EAVRLFISWLKNGGPKSGAPPPS-(NH₂) | NO: 51 |
| A52 | HGEGTFTSDLSKQYEK*(γGlu-γGlu-dpeg- | SEQ ID |
| | CO(CH₂)₁₈CO₂H)EAVRLFISWLKNGGPHSGAPPPS-(NH₂) | NO: 52 |
| A53 | HGEGTFTSDLSKQYEK*(γGlu-γGlu-dpeg- | SEQ ID |
| | CO(CH₂)₁₈CO₂H)EAVRLFISWLKNGGPRSGAPPPS-(NH₂) | NO: 53 |
| A54 | H(Aib)EGTFTSDLSKQYEK*(γGlu-γGlu-dpeg- | SEQ ID |
| | CO(CH₂)₁₈CO₂H)EAVREFIEWLKNGGPSSGAPPPS-(NH₂) | NO: 54 |
| A55 | H(Aib)EGTFTSDLSKQYEK*(γGlu-γGlu-dpeg- | SEQ ID |
| | CO(CH₂)₁₈CO₂H)EAVRQFIEWLKNGGPSSGAPPPS-(NH₂) | NO: 55 |
| A56 | H(Aib)EGTFTSDLSKQYEK*(γGlu-γGlu-dpeg- | SEQ ID |
| | CO(CH₂)₁₈CO₂H)EAARLFIEWLKNGGPSSGAPPPS-(NH₂) | NO: 56 |
| A57 | H(Aib)EGTFTSDLSKQYEK*(γGlu-γGlu-dpeg- | SEQ ID |
| | CO(CH₂)₁₈CO₂H)EAARLFIEWLKNGGPHSGAPPPS-(NH₂) | NO: 57 |
| A58 | H(Aib)EGTFTSDLSKQYEK*(γGlu-γGlu-dpeg- | SEQ ID |
| | CO(CH₂)₁₈CO₂H)EAVRLFIEWLKDGGPSSGAPPPS-(NH₂) | NO: 58 |
| A59 | H(Aib)EGTFTSDLSKQYEK*(γGlu-γGlu-dpeg- | SEQ ID |
| | CO(CH₂)₁₈CO₂H)EAVRLFIEWLKKGGPSSGAPPPS-(NH₂) | NO: 59 |
| A60 | H(Aib)EGTFTSDLSKQYEK*(γGlu-γGlu-dpeg- | SEQ ID |
| | CO(CH₂)₁₈CO₂H)EAVRLFIEWLKSGGPSSGAPPPS-(NH₂) | NO: 60 |
| A61 | H(Aib)EGTFTSDLSKQYEK*(γGlu-γGlu-dpeg- | SEQ ID |
| | CO(CH₂)₁₈CO₂H)EAAREFISWLKNGGPHSGAPPPS-(NH₂) | NO: 61 |
| A62 | H(Aib)EGTFTSDLSKQYEK*(γGlu-γGlu-dpeg- | SEQ ID |
| | CO(CH₂)₁₈CO₂H)EAARKFISWLKNGGPHSGAPPPS-(NH₂) | NO: 62 |
| A63 | H(Aib)EGTFTSDLSKQYEK*(γGlu-γGlu-dpeg- | SEQ ID |
| | CO(CH₂)₁₈CO₂H)EAARKFIEWLKNGGPHSGAPPPS-(NH₂) | NO: 63 |
| A64 | H(Aib)EGTFTSDLSKQYEK*(γGlu-γGlu-dpeg- | SEQ ID |
| | CO(CH₂)₁₈CO₂H)EAARQFISWLKNGGPHSGAPPPS-(NH₂) | NO: 64 |
| A65 | H(Aib)EGTFTSDLSKQYEK*(γGlu-γGlu-dpeg-γGlu-γGlu- | SEQ ID |
| | CO(CH₂)₁₈CO₂H)EAAREFIEWLKNGGPKSGAPPPS-(NH₂) | NO: 65 |
| A66 | H(Aib)EGTFTSDLSKQYEK*(γGlu-γGlu-dpeg-γGlu-γGlu- | SEQ ID |
| | CO(CH₂)₁₈CO₂H)EAAREFIEWLKNGGPDapSGAPPPS-(NH₂) | NO: 66 |
| A67 | H(Aib)EGTYTSDLSKQYEK*(γGlu-γGlu-dpeg-γGlu-γGlu- | SEQ ID |
| | CO(CH₂)₁₈CO₂H)EAAREFIEWLKNGGPSSGAPPPS-(NH₂) | NO: 67 |
| A68 | H(Aib)EGTFTSDLSQQYEK*(γGlu-γGlu-dpeg-γGlu-γGlu- | SEQ ID |
| | CO(CH₂)₁₈CO₂H)EAAREFIEWLKNGGPSSGAPPPS-(NH₂) | NO: 68 |
| A69 | H(Aib)EGTFTSDLSSQYEK*(γGlu-γGlu-dpeg-γGlu-γGlu- | SEQ ID |
| | CO(CH₂)₁₈CO₂H)EAAREFIEWLKNGGPSSGAPPPS-(NH₂) | NO: 69 |
| A70 | H(Aib)EGTFTSDLSEQYEK*(γGlu-γGlu-dpeg-γGlu-γGlu- | SEQ ID |
| | CO(CH₂)₁₈CO₂H)EAAREFIEWLKNGGPSSGAPPPS-(NH₂) | NO: 70 |
| A71 | H(Aib)EGTFTSDLSKQYE(Dap)*(γGlu-γGlu-dpeg-γGlu-γGlu- | SEQ ID |
| | CO(CH₂)₁₈CO₂H)EAAREFIEWLKNGGPSSGAPPPS-(NH₂) | NO: 71 |
| A72 | H(Aib)EGTFTSDLSKQYE(Dab)*(γGlu-γGlu-dpeg-γGlu-γGlu- | SEQ ID |
| | CO(CH₂)₁₈CO₂H)EAAREFIEWLKNGGPSSGAPPPS-(NH₂) | NO: 72 |
| A73 | H(Aib)EGTFTSDLSKQYE(Orn)*(γGlu-γGlu-dpeg-γGlu-γGlu- | SEQ ID |
| | CO(CH₂)₁₈CO₂H)EAAREFIEWLKNGGPSSGAPPPS-(NH₂) | NO: 73 |
| A74 | H(Aib)EGTFTSDLSKQYEK*(γGlu-γGlu-dpeg- | SEQ ID |
| | CO(CH₂)₁₈CO₂H)KAVRLFISWLKNGGPSSGAPPPS-(NH₂) | NO: 74 |
| A75 | H(Aib)EGTFTSDLSKQYEK*(γGlu-γGlu-dpeg- | SEQ ID |
| | CO(CH₂)₁₈CO₂H)EYVRLFISWLKNGGPSSGAPPPS-(NH₂) | NO: 75 |
| A76 | H(Aib)EGTFTSDLSKQYEK*(γGlu-γGlu-dpeg- | SEQ ID |
| | CO(CH₂)₁₈CO₂H)EAAREFIEWLKNGGPSSGAPPPS-(NH₂) | NO: 76 |
| A77 | H(Aib)EGTFTSDLSKQYEK*(γGlu-γGlu-dpeg- | SEQ ID |
| | CO(CH₂)₁₈CO₂H)EAARKFISWLKNGGPSSGAPPPS-(NH₂) | NO: 77 |
| A78 | H(Aib)EGTFTSDLSKQYEK*(γGlu-γGlu-dpeg- | SEQ ID |
| | CO(CH₂)₁₈CO₂H)EAVREFISWLKNGGPSSGAPPPS-(NH₂) | NO: 78 |
| A79 | H(Aib)EGTFTSDVSEQYEK*(γGlu-γGlu-dpeg-γGlu-γGlu- | SEQ ID |
| | CO(CH₂)₁₈CO₂H)EAAREFIEWLKNGGPSSGAPPPS-(NH₂) | NO: 79 |
| A80 | H(Aib)EGTFTSDISEQYEK*(γGlu-γGlu-dpeg-γGlu-γGlu- | SEQ ID |
| | CO(CH₂)₁₈CO₂H)EAAREFIEWLKNGGPSSGAPPPS-(NH₂) | NO: 80 |
| A81 | H(Aib)EGTFTNDLSEQYEK*(γGlu-γGlu-dpeg-γGlu-γGlu- | SEQ ID |
| | CO(CH₂)₁₈CO₂H)EAAREFIEWLKNGGPSSGAPPPS-(NH₂) | NO: 81 |
| A82 | H(Aib)EGTFTNDVSEQYEK*(γGlu-γGlu-dpeg-γGlu-γGlu- | SEQ ID |
| | CO(CH₂)₁₈CO₂H)EAAREFIEWLKNGGPSSGAPPPS-(NH₂) | NO: 82 |
| A83 | H(Aib)EGTFTNDISEQYEK*(γGlu-γGlu-dpeg-γGlu-γGlu- | SEQ ID |
| | CO(CH₂)₁₈CO₂H)EAAREFIEWLKNGGPSSGAPPPS-(NH₂) | NO: 83 |
| A84 | H(Aib)EGTFSSDLSEQYEK*(γGlu-γGlu-dpeg-γGlu-γGlu- | SEQ ID |
| | CO(CH₂)₁₈CO₂H)EAAREFIEWLKNGGPSSGAPPPS-(NH₂) | NO: 84 |
| A85 | H(Aib)EGTFTSDVSKQYEK*(γGlu-γGlu-dpeg- | SEQ ID |
| | CO(CH₂)₁₈CO₂H)EAARLFISWLKNGGPSSGAPPPS-(NH₂) | NO: 85 |
| A86 | H(Aib)EGTFTSDISKQYEK*(γGlu-γGlu-dpeg- | SEQ ID |
| | CO(CH₂)₁₈CO₂H)EAARLFISWLKNGGPSSGAPPPS-(NH₂) | NO: 86 |
| A87 | H(Aib)EGTFTNDLSKQYEK*(γGlu-γGlu-dpeg- | SEQ ID |
| | CO(CH₂)₁₈CO₂H)EAARLFISWLKNGGPSSGAPPPS-(NH₂) | NO: 87 |
| A88 | H(Aib)EGTFTNDVSKQYEK*(γGlu-γGlu-dpeg- | SEQ ID |
| | CO(CH₂)₁₈CO₂H)EAARLFISWLKNGGPSSGAPPPS-(NH₂) | NO: 88 |
| A89 | H(Aib)EGTFTNDISKQYEK*(γGlu-γGlu-dpeg- | SEQ ID |
| | CO(CH₂)₁₈CO₂H)EAARLFISWLKNGGPSSGAPPPS-(NH₂) | NO: 89 |
| A90 | H(Aib)EGTFTSDLSKQYEK*(γGlu-γGlu-dpeg- | SEQ ID |
| | CO(CH₂)₁₈CO₂H)KAVREFISWLKNGGPSSGAPPPS-(NH₂) | NO: 90 |
| A91 | H(Aib)EGTFTSDLSKQYEK*(γGlu-γGlu-dpeg- | SEQ ID |
| | CO(CH₂)₁₈CO₂H)KAARLFISWLKNGGPSSGAPPPS-(NH₂) | NO: 91 |
| A92 | H(Aib)EGTFTSDLSKQYEK*(γGlu-γGlu-dpeg- | SEQ ID |
| | CO(CH₂)₁₈CO₂H)KYVRLFISWLKNGGPSSGAPPPS-(NH₂) | NO: 92 |
| A93 | H(Aib)EGTFTSDLSKQYEK*(γGlu-γGlu-dpeg- | SEQ ID |
| | CO(CH₂)₁₈CO₂H)KYARLFISWLKNGGPSSGAPPPS-(NH₂) | NO: 93 |
| A94 | H(Aib)EGTFTSDLSKQYEK*(γGlu-γGlu-dpeg- | SEQ ID |
| | CO(CH₂)₁₈CO₂H)KYAREFISWLKNGGPSSGAPPPS-(NH₂) | NO: 94 |
| A95 | H(Aib)EGTFTSDLSKQYEK*(γGlu-γGlu-dpeg- | SEQ ID |
| | CO(CH₂)₁₈CO₂H)KYAEEFISWLKNGGPSSGAPPPS-(NH₂) | NO: 95 |
| A96 | H(Aib)EGTFTSDLSKQYEK*(γGlu-γGlu-dpeg- | SEQ ID |
| | CO(CH₂)₁₈CO₂H)EAVRQFISWLKNGGPSSGAPPPS-(NH₂) | NO: 96 |
| A97 | H(Aib)EGTFTSDLSKQYEK*(γGlu-γGlu-dpeg- | SEQ ID |
| | CO(CH₂)₁₈CO₂H)EYAREFISWLKNGGPSSGAPPPS-(NH₂) | NO: 97 |
| A98 | H(Aib)EGTFTSDLSKQYEK*(γGlu-γGlu-dpeg- | SEQ ID |
| | CO(CH₂)₁₈CO₂H)KAAREFISWLKNGGPSSGAPPPS-(NH₂) | NO: 98 |
| A99 | H(Aib)EGTFTSDLSKQYEK*(γGlu-γGlu-dpeg- | SEQ ID |
| | CO(CH₂)₁₈CO₂H)KSAREFISWLKNGGPSSGAPPPS-(NH₂) | NO: 99 |
| A100 | H(Aib)EGTFTSDLSKQYEK*(γGlu-γGlu-dpeg- | SEQ ID |
| | CO(CH₂)₁₈CO₂H)QAAREFISWLKNGGPSSGAPPPS-(NH₂) | NO: 100 |
| A101 | H(Aib)EGTFTSDLSKQYEK*(γGlu-γGlu-dpeg- | SEQ ID |
| | CO(CH₂)₁₈CO₂H)QYAREFISWLKNGGPSSGAPPPS-(NH₂) | NO: 101 |
| A102 | H(Aib)EGTFTSDLSKQYEK*(γGlu-γGlu-dpeg- | SEQ ID |
| | CO(CH₂)₁₈CO₂H)QSAREFISWLKNGGPSSGAPPPS-(NH₂) | NO: 102 |
| A103 | H(Aib)EGTFTNDVSKQYEK*(γGlu-γGlu-dpeg- | SEQ ID |
| | CO(CH₂)₁₈CO₂H)EAAREFISWLKNGGPSSGAPPPS-(NH₂) | NO: 103 |
| A104 | H(Aib)EGTFTNDVSKQYEK*(γGlu-γGlu-dpeg- | SEQ ID |
| | CO(CH₂)₁₈CO₂H)EAVREFISWLKNGGPSSGAPPPS-(NH₂) | NO: 104 |
| A105 | H(Aib)EGTFTSDISKQYEK*(γGlu-γGlu-dpeg- | SEQ ID |
| | CO(CH₂)₁₈CO₂H)EAVRQFIEWLKNGGPSSGAPPPS-(NH₂) | NO: 105 |
| A106 | H(Aib)EGTFTSDISKQYEK*(γGlu-γGlu-dpeg- | SEQ ID |
| | CO(CH₂)₁₈CO₂H)EAARQFIEWLKNGGPSSGAPPPS-(NH₂) | NO: 106 |
| A107 | H(Aib)EGTFTNDISKQYEK*(γGlu-γGlu-dpeg- | SEQ ID |
| | CO(CH₂)₁₈CO₂H)EAAREFISWLKNGGPSSGAPPPS-(NH₂) | NO: 107 |
| A108 | H(Aib)EGTFTNDISKQYEK*(γGlu-γGlu-dpeg- | SEQ ID |
| | CO(CH₂)₁₈CO₂H)EAVREFISWLKNGGPSSGAPPPS-(NH₂) | NO: 108 |
| A109 | H(Aib)EGTFTNDISKQYEK*(γGlu-γGlu-dpeg- | SEQ ID |
| | CO(CH₂)₁₈CO₂H)EAVRQFIEWLKNGGPSSGAPPPS-(NH₂) | NO: 109 |
| A110 | H(Aib)EGTFTNDISKQYEK*(γGlu-γGlu-dpeg- | SEQ ID |
| | CO(CH₂)₁₈CO₂H)EAARQFIEWLKNGGPSSGAPPPS-(NH₂) | NO: 110 |
| A111 | H(Aib)EGTFTSDISKQYEK*(Glu-γGlu-dpeg- | SEQ ID |
| | CO(CH₂)₁₈CO₂H)EAARKFISWLKNGGPSSGAPPPS-(NH₂) | NO: 111 |
| A112 | H(Aib)EGTFTNDISKQYEK*(γGlu-γGlu-dpeg- | SEQ ID |
| | CO(CH₂)₁₈CO₂H)EAARKFISWLKNGGPSSGAPPPS-(NH₂) | NO: 112 |
| A113 | H(Aib)EGTFTNDLSKQYEK*(γGlu-γGlu-dpeg- | SEQ ID |
| | CO(CH₂)₁₈CO₂H)EAARKFISWLKNGGPSSGAPPPS-(NH₂) | NO: 113 |
| A114 | H(Aib)EGTFTNDVSKQYEK*(γGlu-γGlu-dpeg- | SEQ ID |
| | CO(CH₂)₁₈CO₂H)EAARKFISWLKNGGPSSGAPPPS-(NH₂) | NO: 114 |
| A115 | H(Aib)EGTFTSDVSKQYEK*(γGlu-γGlu-dpeg- | SEQ ID |
| | CO(CH₂)₁₈CO₂H)EAARKFISWLKNGGPSSGAPPPS-(NH₂) | NO: 115 |
| A116 | H(Aib)EGTFTNDISKQYEK*(γGlu-γGlu-dpeg- | SEQ ID |
| | CO(CH₂)₁₈CO₂H)EYAREFISWLKNGGPSSGAPPPS-(NH₂) | NO: 116 |
| A117 | H(Aib)EGTFTSDLSKQYEK*(γGlu-γGlu-dpeg- | SEQ ID |
| | CO(CH₂)₁₈CO₂H)E⁺AARK⁺FISWLKNGGPSSGAPPPS-(NH₂) | NO: 117 |
| A118 | H(Aib)EGTFTSDLSKQYEK*(γGlu-γGlu-dpeg- | SEQ ID |
| | CO(CH₂)₁₈CO₂H)K⁺AARE⁺FISWLKNGGPSSGAPPPS-(NH₂) | NO: 118 |
| A119 | H(Aib)EGTFTSDLSKQYEK*(γGlu-γGlu-dpeg- | SEQ ID |
| | CO(CH₂)₁₈CO₂H)EAARE⁺FISWLKK⁺GGPSSGAPPPS-(NH₂) | NO: 119 |
| A120 | H(Aib)EGTFTSDLSKQYEK*(γGlu-γGlu-dpeg- | SEQ ID |
| | CO(CH₂)₁₈CO₂H)EAAK⁺KFIE⁺WLKNGGPSSGAPPPS-(NH₂) | NO: 120 |
| A121 | H(Aib)EGTFTSDLSKQYEK*(γGlu-γGlu-dpeg- | SEQ ID |
| | CO(CH₂)₁₈CO₂H)EAAE⁺EFIK⁺WLKNGGPSSGAPPPS-(NH₂) | NO: 121 |
| A122 | H(Aib)EGTFTSDLSKQMEEEAVRK*(γGlu-γGlu-dpeg- | SEQ ID |
| | CO(CH₂)₁₈CO₂H)FISWLKNGGPSSGAPPPS-(NH₂) | NO: 122 |
| A123 | H(Aib)EGTFTSDLSKQYEEEAVK*(γGlu-γGlu-dpeg- | SEQ ID |
| | CO(CH₂)₁₈CO₂H)EFISWLKNGGPSSGAPPPS-(NH₂) | NO: 123 |
| A124 | H(Aib)EGTFTSDLSKQMEEEAVK*(γGlu-γGlu-dpeg- | SEQ ID |
| | CO(CH₂)₁₈CO₂H)EFISWLKNGGPSSGAPPPS-(NH₂) | NO: 124 |
| A125 | H(Aib)EGTFTSDLSKQMEEEAK*(γGlu-γGlu-dpeg- | SEQ ID |
| | CO(CH₂)₁₈CO₂H)REFISWLKNGGPSSGAPPPS-(NH₂) | NO: 125 |
| A126 | H(Aib)EGTFTSDLSKQYEEEAVK*(γGlu-γGlu-dpeg- | SEQ ID |
| | CO(CH₂)₁₈CO₂H)EFISWLKNGGPSSGAPPPS-NH₂ | NO: 126 |
| A127 | H(Aib)EGTFTSDLSKQYEEEAAK*(γGlu-γGlu-dpeg- | SEQ ID |
| | CO(CH₂)₁₈CO₂H)KFISWLKNGGPSSGAPPPS-(NH₂) | NO: 127 |
| A128 | H(Aib)EGTFTSDLSKQYEEKYAK*(γGlu-γGlu-dpeg- | SEQ ID |
| | CO(CH₂)₁₈CO₂H)EFISWLKNGGPSSGAPPPS-(NH₂) | NO: 128 |
| A129 | H(Aib)EGTFTSDLSKQYEEKYKK*(γGlu-γGlu-dpeg- | SEQ ID |
| | CO(CH₂)₁₈CO₂H)EFISWLKNGGPSSGAPPPS-(NH₂) | NO: 129 |
| A130 | H(Aib)EGTFTSDLSKQYEEEAVK*(γGlu-γGlu-dpeg- | SEQ ID |
| | CO(CH₂)₁₈CO₂H)EFISWLKQGGPSSGAPPPS-(NH₂) | NO: 130 |
| A131 | H(Aib)EGTFTSDLSKQYEEEAAK*(γGlu-γGlu-dpeg- | SEQ ID |
| | CO(CH₂)₁₈CO₂H)KFISWLKQGGPSSGAPPPS-(NH₂) | NO: 131 |
| A132 | H(Aib)EGTFTSDVSKQYEK*(γGlu-γGlu-dpeg- | SEQ ID |
| | CO(CH₂)₁₈CO₂H)EAVRKFISWLKNGGPSSGAPPPS-(NH₂) | NO: 132 |
| A133 | H(Aib)EGTFTSDISKQYEK*(γGlu-γGlu-dpeg- | SEQ ID |
| | CO(CH₂)₁₈CO₂H)EAVREFISWLKNGGPSSGAPPPS-(NH₂) | NO: 133 |
| A134 | H(Aib)EGTFTSDISKQYEK*(γGlu-γGlu-dpeg- | SEQ ID |
| | CO(CH₂)₁₈CO₂H)EAVRKFISWLKNGGPSSGAPPPS-(NH₂) | NO: 134 |
| A135 | H(Aib)EGTFTSDVSKQYEK*(γGlu-γGlu-dpeg- | SEQ ID |
| | CO(CH₂)₁₈CO₂H)EAVK⁺KFIE⁺WLKNGGPSSGAPPPS-(NH₂) | NO: 135 |
| A136 | H(Aib)EGTFTSDISKQYEK*(γGlu-γGlu-dpeg- | SEQ ID |
| | CO(CH₂)₁₈CO₂H)EAVK⁺EFIE⁺WLKNGGPSSGAPPPS-(NH₂) | NO: 136 |
| A137 | H(Aib)EGTFTSDVSKQYEK*(γGlu-γGlu-dpeg- | SEQ ID |
| | CO(CH₂)₁₈CO₂H)EAAK⁺KFIE⁺WLKNGGPSSGAPPPS-(NH₂) | NO: 137 |
| A138 | H(Aib)EGTFTSDVSKQYEK*(γGlu-γGlu-dpeg- | SEQ ID |
| | CO(CH₂)₁₈CO₂H)EAAK⁺KFIE⁺WLKQGGPSSGAPPPS-(NH₂) | NO: 138 |
| A139 | H(Aib)EGTFTSDVSKQYEK*(γGlu-γGlu-dpeg- | SEQ ID |
| | CO(CH₂)₁₈CO₂H)EAARKFISWLKQGGPSSGAPPPS-(NH₂) | NO: 139 |
| A140 | H(Aib)EGTFTSDVSKQYEK*(γGlu-γGlu-dpeg- | SEQ ID |
| | CO(CH₂)₁₈CO₂H)EAVK⁺KFIE⁺WLKQGGPSSGAPPPS-(NH₂) | NO: 140 |
| A141 | H(Aib)EGTFTSDVSKQYEK*(γGlu-γGlu-dpeg- | SEQ ID |
| | CO(CH₂)₁₈CO₂H)K⁺AARE⁺FISWLKNGGPSSGAPPPS-(NH₂) | NO: 141 |
| A142 | H(Aib)EGTFTSDLSKQYEK*(γGlu-γGlu-dpeg- | SEQ ID |
| | CO(CH₂)₁₈CO₂H)EAVRKFIEWLKNGGPSSGAPPPS-(NH₂) | NO: 142 |
| A143 | H(Aib)EGTFTSDLSKQYEK*(γGlu-γGlu-dpeg-γGlu-γGlu- | SEQ ID |
| | CO(CH₂)₁₈CO₂H)EAVRLFIEWLKNGGPSSGAPPPS-(NH₂) | NO: 143 |
| A144 | HGEGTFTSDLSKQYEK*(γGlu-γGlu-dpeg-γGlu-γGlu, | SEQ ID |
| | CO(CH₂)₁₈CO₂H)EAVRLFISWLKNGGPSSGAPPPS-(NH₂) | NO: 144 |
| A145 | H(Aib)EGTFTSDLSKQYEK*(γGlu-γGlu-dpeg-γGlu-γGlu- | SEQ ID |
| | CO(CH₂)₁₈CO₂H)EAVRLFIEWLKNGGPHSGAPPPS-(NH₂) | NO: 145 |
| A146 | H(Aib)EGTFTSDLSKQYEK*(γGlu-γGlu-dpeg-γGlu-γGlu- | SEQ ID |
| | CO(CH₂)₁₈CO₂H)EAARLFIEWLKNGGPSSGAPPPS-(NH₂) | NO: 146 |
| A147 | H(Aib)EGTFTSDLSKQYEK*(γGlu-γGlu-dpeg-γGlu-γGlu- | SEQ ID |
| | CO(CH₂)₁₈CO₂H)EAAREFIEWLKNGGPSSGAPPPS-(NH₂) | NO: 147 |
| A148 | H(Aib)EGTFTSDLSKQYEK*(γGlu-γGlu-dpeg-γGlu-γGlu- | SEQ ID |
| | CO(CH₂)₁₈CO₂H)EAARKFIEWLKNGGPSSGAPPPS-(NH₂) | NO: 148 |
| A149 | H(Aib)EGTFTSDLSKQYEK*(γGlu-γGlu-dpeg-γGlu-γGlu- | SEQ ID |
| | CO(CH₂)₁₈CO₂H)EAARLFIEWLKNGGPHSGAPPPS-(NH₂) | NO: 149 |
| A150 | H(Aib)EGTFTSDLSKQYEK*(γGlu-γGlu-dpeg-γGlu-γGlu- | SEQ ID |
| | CO(CH₂)₁₈CO₂H)EAARKFIEWLKNGGPHSGAPPPS-(NH₂) | NO: 150 |
| A151 | H(Aib)EGTFTSDLSKQYEK*(γGlu-γGlu-dpeg- | SEQ ID |
| | CO(CH₂)₁₈CO₂H)EAVRKFIEWLKNGGPHSGAPPPS-(NH₂) | NO: 151 |
| A152 | H(Aib)EGTFTSDLSKQYEK*(γGlu-γGlu-dpeg- | SEQ ID |
| | CO(CH₂)₁₈CO₂H)EAVREFIEWLKNGGPHSGAPPPS-(NH₂) | NO: 152 |
| A153 | H(Aib)EGTFTSDLSKQYEK*(γGlu-γGlu-dpeg- | SEQ ID |
| | CO(CH₂)₁₈CO₂H)EAVRQFIEWLKNGGPHSGAPPPS-(NH₂) | NO: 153 |
| A154 | H(Aib)EGTFTSDLSKQYEK*(γGlu-γGlu-dpeg-γGlu-γGlu- | SEQ ID |
| | CO(CH₂)₁₈CO₂H)EAAREFIEWLKNGGPHSGAPPPS-(NH₂) | NO: 154 |
| A155 | H(Aib)EGTFTSDLSKQYEK*(γGlu-γGlu-dpeg-γGlu-γGlu- | SEQ ID |
| | CO(CH₂)₁₈CO₂H)EAARQFIEWLKNGGPHSGAPPPS-(NH₂) | NO: 155 |
| A156 | H(Aib)EGTFTSDLSKQYEK*(γGlu-γGlu-dpeg-γGlu-γGlu- | SEQ ID |
| | CO(CH₂)₁₈CO₂H)EAVRLFISWLKNGGPHSGAPPPS-(NH₂) | NO: 156 |
| A157 | H(Aib)EGTFTSDLSKQYEK*(γGlu-γGlu-dpeg- | SEQ ID |
| | CO(CH₂)₁₈CO₂H)EAAREFISWLKNGGPSSGAPPPS-(NH₂) | NO: 157 |
| A158 | H(Aib)EGTFTSDLSKQYEK*(γGlu-γGlu-dpeg- | SEQ ID |
| | CO(CH₂)₁₈CO₂H)EAVRKFISWLKNGGPSSGAPPPS-(NH₂) | NO: 158 |
| A159 | H(Aib)EGTFTSDLSEQYE(Dap)*(γGlu-γGlu-dpeg-γGlu-γGlu- | SEQ ID |
| | CO(CH₂)₁₈CO₂H)EAAREFIEWLKNGGPSSGAPPPS-(NH₂) | NO: 159 |
| A160 | H(Aib)EGTFTSDLSEQYE(Dap)*(γGlu-γGlu-DPEG-γGlu-γGlu- | SEQ ID |
| | CO(CH₂)₁₈CO₂H)EAARLFIEWLKNGGPSSGAPPPS-(NH₂) | NO: 160 |
| A161 | H(Aib)EGTFTSDLSEQYEK*(Glu-γGlu-dpeg-γGlu-γGlu- | SEQ ID |
| | CO(CH₂)₁₈CO₂H)EAARLFIEWLKNGGPSSGAPPPS-(NH₂) | NO: 161 |
| A162 | H(Aib)EGTFTEDLSKQYEK*(γGlu-dpeg-CO(CH₂)₁₈CO₂H)EAVRLFISWL | SEQ ID |
| | KNGGPSSGAPPPS-(NH₂) | NO: 162 |

TABLE 5
Chemical structures of exemplary compounds: GLP-1 receptor agonist polypeptides
comprising a lipophilic substituent via a spacer, one compound of which further comprises a
bridging moiety.
HGEGTFTSDLSKQMEK*(dpeg-dpeg-γGlu-CO(CH₂)₁₆CO₂H)EAVRLFIEWLKNGGPSSGAPPPS-(NH₂)
A6
SEQ ID NO: 6

[chemical structure]

H(Aib)EGTFTSDLSKQYEK*(γGlu-γGlu-dpeg-CO(CH₂)₁₈CO₂H)EAVRLFISWLKNGGPSSGAPPPS-(NH₂)
A45
SEQ ID NO: 45

[chemical structure]

H(Aib)EGTFTSDLSKQYEK*(γGlu-γGlu-dpeg-CO(CH₂)₁₈CO₂H)EAVRLFIEWLKNGGPSSGAPPPS-(NH₂)
A46
SEQ ID NO: 46

[chemical structure]

H(Aib)EGTFTSDLSKQYEK*(γGlu-γGlu-dpeg-CO(CH₂)₁₈CO₂H)EAVREFIEWLKNGGPSSGAPPPS-(NH₂)
A54
SEQ ID NO: 54

[chemical structure]

H(Aib)EGTFTSDLSKQYEK*(γGlu-γGlu-dpcg-CO(CH₂)₁₈CO₂H)EAVRQFIEWLKNGGPSSGAPPPS-(NH₂)
A55
SEQ ID NO: 55

[chemical structure]

H(Aib)EGTFTSDLSKQYEK*(γGlu-γGlu-dpeg-CO(CH₂)₁₈CO₂H)EAARKFISWLKNGGPSSGAPPPS-(NH₂)
A77
SEQ ID NO: 77

[chemical structure]

H(Aib)EGTFTSDLSKQYEK*(γGlu-γGlu-dpeg-CO(CH₂)₁₈CO₂H)EAVREFISWLKNGGPSSGAPPPS-(NH₂)
A78
SEQ ID NO: 78

[chemical structure]

H(Aib)EGTFTNDISKQYEK*(γGlu-γGlu-dpeg-CO(CH₂)₁₈CO₂H)EAVREFISWLKNGGPSSGAPPPS-(NH₂)
A108
SEQ ID NO: 108

[chemical structure]

H(Aib)EGTFTSDISKQYEK*(γGlu-γGlu-dpeg-CO(CH₂)₁₈CO₂H)EAARKFISWLKNGGPSSGAPPPS-(NH₂)
A111
SEQ ID NO: 111

[chemical structure]

H(Aib)EGTFTNDISKQYEK*(γGlu-γGlu-dpeg-CO(CH₂)₁₈CO₂H)EAARKFISWLKNGGPSSGAPPPS-(NH₂)
A112
SEQ ID NO: 112

[chemical structure]

H(Aib)EGTFTNDVSKQYEK*(γGlu-γGlu-dpeg-CO(CH₂)₁₈CO₂H)EAARKFISWLKNGGPSSGAPPPS-(NH₂)
A114
SEQ ID NO: 114

[chemical structure]

H(Aib)EGTFTSDVSKQYEK*(γGlu-γGlu-dpeg-CO(CH₂)₁₈CO₂H)EAARKFISWLKNGGPSSGAPPPS-(NH₂)
A115
SEQ ID NO: 115

[chemical structure]

H(Aib)EGTFTSDLSKQYEK*(γGlu-γGlu-dpeg-CO(CH₂)₁₈CO₂H)EAAK⁺KFIE⁺WLKNGGPSSGAPPPS-(NH₂)
A120
SEQ ID NO: 120

[chemical structure]

H(Aib)EGTFTSDVSKQYEK*(γGlu-γGlu-dpeg-CO(CH₂)₁₈CO₂H)EAVRKFISWLKNGGPSSGAPPPS-(NH₂)
A132
SEQ ID NO: 132

[chemical structure]

H(Aib)EGTFTSDISKQYEK*(γGlu-γGlu-dpeg-CO(CH₂)₁₈CO₂H)EAVRKFISWLKNGGPSSGAPPPS-(NH₂)
A134
SEQ ID NO: 134

[chemical structure]

H(Aib)EGTFTSDVSKQYEK*(γGlu-γGlu-dpeg-CO(CH₂)₁₈CO₂H)EAARKFISWLKQGGPSSGAPPPS-(NH₂)
A139
SEQ ID NO: 139

[chemical structure]

H(Aib)EGTFTEDLSKQYEK*(γGlu-dpeg-CO(CH₂)₁₈CO₂H)EAVRLFISWLKNGGPSSGAPPPS-(NH₂)
A162
SEQ ID NO: 162

[chemical structure]

Notes:
each K* independently represents an L-lysine covalently bound to a lipophilic substituent, optionally via a spacer;
each pairing of K⁺ and E⁺ represents a covalent amide linkage derived from the amino sidechain of K⁺ and the carboxy sidechain of E⁺ (with loss of a water molecule). For example, the segment -AK⁺AARE⁺W- (SEQ ID NO: 9128) represents: [chemical structure]
as used herein, dpeg represents —COCH₂O(CH₂)₂O(CH₂)₂NH—; and dpeg-dpeg represents-COCH₂O(CH₂)₂O(CH₂)₂NH—COCH₂O(CH₂)₂O(CH₂)₂NH—; and
carboxy terminal amino acid, i.e. S₃₉, shown as —S₃₉—(NH₂), depicts —NH—CH(CH₂OH)—CONH₂.

[0854] In some embodiments, the isolated polypeptide comprises an amino acid sequence selected from the group consisting of SEQ ID NOs: 1 to 162. or a pharmaceutically acceptable salt thereof.

[0855] In some embodiments, the isolated polypeptide comprises an amino acid sequence selected from the group consisting of SEQ ID NOs: 6, 45, 46, 54, 55, 62, 68, 70, 71, 74, 75, 77, 78, 85, 86, 87, 88, 89, 92, 94, 103, 107, 108, 111, 112, 114, 115, 120, 132, 134, 139, 147, and 149.

[0856] In some embodiments, the isolated polypeptide comprises an amino acid sequence selected from the group consisting of SEQ ID NOs: 45, 46, 54, 55, 62, 68, 70, 74, 75, 77, 78, 85, 86, 87, 88, 89, 92, 94, 103, 107, 108, 111, 112, 114, 115, 120, 132, 134, 139, 147, and 149.

[0857] In some embodiments, the isolated polypeptide comprises an amino acid sequence selected from the group consisting of SEQ ID NOs: 6, 45, 46, 54, 55, 77, 78, 108, 111, 112, 114, 115, 120, 132, 134, and 139 or a pharmaceutically acceptable salt thereof.

[0858] In some embodiments, the isolated polypeptide comprises an amino acid sequence selected from the group consisting of SEQ ID NOs: 45, 46, 54, 55, 77, 78, 108, 111, 112, 114, 115, 120, 132, 134, and 139.

[0859] In some embodiments, the isolated polypeptide comprises an amino acid sequence selected from the group consisting of SEQ ID NOs: 55, 115, 120 and 132 or a pharmaceutically acceptable salt thereof.

[0860] In some embodiments, the isolated polypeptide comprises an amino acid sequence of SEQ ID NO: 55 or a pharmaceutically acceptable salt thereof. In some embodiments, the isolated polypeptide comprises an amino acid sequence of SEQ ID NO: 115 or a pharmaceutically acceptable salt thereof. In some embodiments, the isolated polypeptide comprises an amino acid sequence of SEQ ID NO: 120 or a pharmaceutically acceptable salt thereof. In some embodiments, the isolated polypeptide comprises an amino acid sequence of SEQ ID NO: 132 or a pharmaceutically acceptable salt thereof.

[0861] In some embodiments, the present invention provides a compound set forth in Table 4, above, or a pharmaceutically acceptable salt thereof. In some embodiments, the present invention provides an isolated polypeptide that comprises an amino acid sequence selected from the group consisting of SEQ ID NOs: 1 to 162 or a pharmaceutically acceptable salt thereof. In some embodiments the pharmaceutically acceptable salt is an acetate salt. In some embodiments the pharmaceutically acceptable salt is a trifluoroacetic acid (TFA) salt. In some embodiments the pharmaceutically acceptable salt is a hydrochloric acid (HCl) salt.

[0862] In one embodiment, the compound is the isolated polypeptide comprising an amino acid sequence of SEQ ID NO: 55 or a pharmaceutically acceptable salt thereof. In some embodiments, the compound is the acetate salt of the isolated polypeptide comprising an amino acid sequence of SEQ ID NO: 55. In some embodiments, the compound is the TFA salt of the isolated polypeptide comprising an amino acid sequence of SEQ ID NO: 55. In some embodiments, the compound is the HCl salt of the isolated polypeptide comprising an amino acid sequence of SEQ ID NO: 55.

[0863] In one embodiment, the compound is the isolated polypeptide comprising an amino acid sequence of SEQ ID NO: 115 or a pharmaceutically acceptable salt thereof. In some embodiments, the compound is the acetate salt of the isolated polypeptide comprising an amino acid sequence of SEQ ID NO: 115. In some embodiments, the compound is the TFA salt of the isolated polypeptide comprising an amino acid sequence of SEQ ID NO: 115. In some embodiments, the compound is the HCl salt of the isolated polypeptide comprising an amino acid sequence of SEQ ID NO: 115.

[0864] In one embodiment, the compound is the isolated polypeptide comprising an amino acid sequence of SEQ ID NO: 120 or a pharmaceutically acceptable salt thereof. In some embodiments, the compound is the acetate salt of the isolated polypeptide comprising an amino acid sequence of SEQ ID NO: 120. In some embodiments, the compound is the TFA salt of the isolated polypeptide comprising an amino acid sequence of SEQ ID NO: 120. In some embodiments, the compound is the HCl salt of the isolated polypeptide comprising an amino acid sequence of SEQ ID NO: 120.

[0865] In one embodiment, the compound is the isolated polypeptide comprising an amino acid sequence of SEQ ID NO: 132 or a pharmaceutically acceptable salt thereof. In some embodiments, the compound is the acetate salt of the isolated polypeptide comprising an amino acid sequence of SEQ ID NO: 132. In some embodiments, the compound is the TFA salt of the isolated polypeptide comprising an amino acid sequence of SEQ ID NO: 132. In some embodiments, the compound is the HCl salt of the isolated polypeptide comprising an amino acid sequence of SEQ ID NO: 132.

```
TABLE 6
Exemplary compounds: GLP-1 receptor agonist polypeptides
optionally comprising a lipophilic substituent, optionally
  via a spacer; and optionally further comprising a
  bridging moiety.
```

| Compound | | SEQ ID |
|---|---|---|
| No. | Sequence | NO: |
| B1 | HGEGTFTSDLSKQKEEEAVRLFIEWLKNGGPSSGAPPP | SEQ ID |
| | S-(NH₂) | NO: 1001 |
| B2 | HGEGTFTSDLSKQMEEKAVRLFIEWLKNGGPSSGAPP | SEQ ID |
| | PS-(NH₂) | NO: 1002 |
| B3 | HGEGTFTSDLSKQMEEEKVRLFIEWLKNGGPSSGAPP | SEQ ID |
| | PS-(NH₂) | NO: 1003 |
| B4 | HGEGTFTSDLSKQMEEEAVKLFIEWLKNGGPSSGAPP | SEQ ID |
| | PS-(NH₂) | NO: 1004 |
| B5 | HGEGTFTSDLSKQMEEEAVRKFIEWLKNGGPSSGAPP | SEQ ID |
| | PS-(NH₂) | NO: 1005 |
| B6 | HGEGTFTSDLSKQMEKEAVRLFIEWLKNGGPSSGAPP | SEQ ID |
| | PS-(NH₂) | NO: 1006 |
| B13 | HGEGTFTSDLSKQLEKEAVRLFIEWLKNGGPSSGAPPP | SEQ ID |
| | S-(NH₂) | NO: 1013 |
| B14 | HGEGTFTSDLSKQFEKEAVRLFIEWLKNGGPSSGAPPP | SEQ ID |
| | S-(NH₂) | NO: 1014 |
| B15 | HGEGTFTSDLSKQYEKEAVRLFIEWLKNGGPSSGAPPP | SEQ ID |
| | S-(NH₂) | NO: 1015 |
| B16 | HGEGTFTSDLSKQQEKEAVRLFIEWLKNGGPSSGAPPP | SEQ ID |
| | S-(NH₂) | NO: 1016 |
| B17 | HGEGTFTSDLSKYMEKEAVRLFIEWLKNGGPSSGAPP | SEQ ID |
| | PS-(NH₂) | NO: 1017 |
| B18 | HGEGTFTSDLSKEMEKEAVRLFIEWLKNGGPSSGAPP | SEQ ID |
| | PS-(NH₂) | NO: 1018 |
| B19 | HGEGTFTSDLSKKMEKEAVRLFIEWLKNGGPSSGAPP | SEQ ID |
| | PS-(NH₂) | NO: 1019 |
| B20 | HGEGTFTSDLSKSMEKEAVRLFIEWLKNGGPSSGAPPP | SEQ ID |
| | S-(NH₂) | NO: 1020 |
| B21 | HAEGTFTSDLSKQMEKEAVRLFIEWLKNGGPSSGAPP | SEQ ID |
| | PS-(NH₂) | NO: 21 |
| B22 | H(Aib)EGTFTSDLSKQMEKEAVRLFIEWLKNGGPSSGA | SEQ ID |
| | PPPS-(NH₂) | NO: 1022 |
| B23 | HA(n-methyl-E)GTFTSDLSKQMEKEAVRLFIEWLKNG | SEQ ID |
| | GPSSGAPPPS-(NH₂) | NO: 1023 |
| B24 | HGEGTFTSDLSKQMEKEAVRLFIEWLKNGGPSSGAPP | SEQ ID |
| | PS-(NH₂) | NO: 1024 |
| B27 | HGEGTFTSDLSKQYEKEAVRLFIAWLKNGGPSSGAPP | SEQ ID |
| | PS-(NH₂) | NO: 1027 |
| B28 | HGEGTFTSDLSKQYEKEAVRLFISWLKNGGPSSGAPPP | SEQ ID |
| | S-(NH₂) | NO: 1028 |
| B29 | HGEGTFTSDLSKQYEKEAVRLFIKWLKNGGPSSGAPP | SEQ ID |
| | PS-(NH₂) | NO: 1029 |
| B30 | HGEGTFTSDLSKQYEKEAVRLFIQWLKNGGPSSGAPP | SEQ ID |
| | PS-(NH₂) | NO: 1030 |
| B31 | HGEGTFTSDLSKQYEKEAVRLFIYWLKNGGPSSGAPP | SEQ ID |
| | PS-(NH₂) | NO: 1031 |
| B32 | HGEGTFTSDLSKQYEKEAVRLFI(Aib)WLKNGGPSSGA | SEQ ID |
| | PPPS-(NH₂) | NO: 1032 |
| B33 | HGEGTFTSDLSKQMEKEAVRLFIEWLKNGGPSSGAPP | SEQ ID |
| | PS-(NH₂) | NO: 1033 |
| B39 | HGEGTFTSDLSKQYEKEAVREFIEWLKNGGPSSGAPPP | SEQ ID |
| | S-(NH₂) | NO: 1039 |
| B40 | HGEGTFTSDLSKQYEKEAVRYFIEWLKNGGPSSGAPP | SEQ ID |
| | PS-(NH₂) | NO: 1040 |
| B41 | HGEGTFTSDLSKQYEKEAVRQFIEWLKNGGPSSGAPP | SEQ ID |
| | PS-(NH₂) | NO: 1041 |
| B42 | HGEGTFTSDLSKQYEKEAVRKFIEWLKNGGPSSGAPP | SEQ ID |
| | PS-(NH₂) | NO: 1042 |
| B43 | HGEGTFTSDLSKQYEKEAVR(Aib)FIEWLKNGGPSSGA | SEQ ID |
| | PPPS-(NH₂) | NO: 1043 |
| B44 | HGEGTFTSDLSKQYEKEAVRHFIEWLKNGGPSSGAPP | SEQ ID |
| | PS-(NH₂) | NO: 1044 |
| B45 | H(Aib)EGTFTSDLSKQYEKEAVRLFISWLKNGGPSSGA | SEQ ID |
| | PPPS-(NH₂) | NO: 1045 |
| B46 | H(Aib)EGTFTSDLSKQYEKEAVRLFIEWLKNGGPSSGA | SEQ ID |
| | PPPS-(NH₂) | NO: 1046 |
| B47 | HGEGTFTSELSKQYEKEAVRLFIEWLKNGGPSSGAPPP | SEQ ID |
| | S-(NH₂) | NO: 1047 |
| B48 | HGEGTFTSDLSKQYEKEAAKLFISWLKNGGPSSGAPPP | SEQ ID |
| | S-(NH₂) | NO: 1048 |
| B49 | HGEGTFTSDLSKQYEKEAARLFISWLKNGGPSSGAPPP | SEQ ID |
| | S-(NH₂) | NO: 1049 |
| B50 | HGEGTFTSDLSKQYEKEAVRLFISWLKNGGP(Dap)SG | SEQ ID |
| | APPPS-(NH₂) | NO: 1050 |
| B51 | HGEGTFTSDLSKQYEKEAVRLFISWLKNGGPKSGAPP | SEQ ID |
| | PS-(NH₂) | NO: 1051 |
| B52 | HGEGTFTSDLSKQYEKEAVRLFISWLKNGGPHSGAPP | SEQ ID |
| | PS-(NH₂) | NO: 1052 |
| B53 | HGEGTFTSDLSKQYEKEAVRLFISWLKNGGPRSGAPP | SEQ ID |
| | PS-(NH₂) | NO: 1053 |
| B54 | H(Aib)EGTFTSDLSKQYEKEAVREFIEWLKNGGPSSGA | SEQ ID |
| | PPPS-(NH₂) | NO: 1054 |
| B55 | H(Aib)EGTFTSDLSKQYEKEAVRQFIEWLKNGGPSSGA | SEQ ID |
| | PPPS-(NH₂) | NO: 1055 |
| B56 | H(Aib)EGTFTSDLSKQYEKEAARLFIEWLKNGGPSSGA | SEQ ID |
| | PPPS-(NH₂) | NO: 1056 |
| B57 | H(Aib)EGTFTSDLSKQYEKEAARLFIEWLKNGGPHSGA | SEQ ID |
| | PPPS-(NH₂) | NO: 1057 |
| B58 | H(Aib)EGTFTSDLSKQYEKEAVRLFIEWLKDGGPSSGA | SEQ ID |
| | PPPS-(NH₂) | NO: 1058 |
| B59 | H(Aib)EGTFTSDLSKQYEKEAVRLFIEWLKKGGPSSGA | SEQ ID |
| | PPPS-(NH₂) | NO: 1059 |
| B60 | H(Aib)EGTFTSDLSKQYEKEAVRLFIEWLKSGGPSSGA | ₂SEQ ID |
| | PPPS-(NH₂) | NO: 1060 |
| B61 | H(Aib)EGTFTSDLSKQYEKEAAREFISWLKNGGPHSGA | SEQ ID |
| | PPPS-(NH₂) | NO: 1061 |
| B62 | H(Aib)EGTFTSDLSKQYEKEAARKFISWLKNGGPHSGA | SEQ ID |
| | PPPS-(NH₂) | NO: 1062 |
| B63 | H(Aib)EGTFTSDLSKQYEKEAARKFIEWLKNGGPHSG | SEQ ID |
| | APPPS-(NH₂) | NO: 1063 |
| B64 | H(Aib)EGTFTSDLSKQYEKEAARQFISWLKNGGPHSGA | SEQ ID |
| | PPPS-(NH₂) | NO: 1064 |
| B65 | H(Aib)EGTFTSDLSKQYEKEAAREFIEWLKNGGPKSGA | SEQ ID |
| | PPPS-(NH₂) | NO: 1065 |
| B66 | H(Aib)EGTFTSDLSKQYEKEAAREFIEWLKNGGP(Dap) | SEQ ID |
| | SGAPPPS-(NH₂) | NO: 1066 |
| B67 | H(Aib)EGTYTSDLSKQYEKEAAREFIEWLKNGGPSSGA | SEQ ID |
| | PPPS-(NH₂) | NO: 1067 |
| B68 | H(Aib)EGTFTSDLSQQYEKEAAREFIEWLKNGGPSSGA | SEQ ID |
| | PPPS-(NH₂) | NO: 1068 |
| B69 | H(Aib)EGTFTSDLSSQYEKEAAREFIEWLKNGGPSSGA | SEQ ID |
| | PPPS-(NH₂) | NO: 1069 |
| B70 | H(Aib)EGTFTSDLSEQYEKEAAREFIEWLKNGGPSSGA | SEQ ID |
| | PPPS-(NH₂) | NO: 1070 |
| B71 | H(Aib)EGTFTSDLSKQYE(Dap)EAAREFIEWLKNGGPSS | SEQ ID |
| | GAPPPS-(NH₂) | NO: 1071 |
| B72 | H(Aib)EGTFTSDLSKQYE(Dab)EAAREFIEWLKNGGPSS | SEQ ID |
| | GAPPPS-(NH₂) | NO: 1072 |
| B73 | H(Aib)EGTFTSDLSKQYE(Orn)EAAREFIEWLKNGGPSS | SEQ ID |
| | GAPPPS-(NH₂) | NO: 1073 |
| B74 | H(Aib)EGTFTSDLSKQYEKKAVRLFISWLKNGGPSSGA | SEQ ID |
| | PPPS-(NH₂) | NO: 1074 |
| B75 | H(Aib)EGTFTSDLSKQYEKEYVRLFISWLKNGGPSSGA | SEQ ID |
| | PPPS-(NH₂) | NO: 1075 |
| B76 | H(Aib)EGTFTSDLSKQYEKEAAREFIEWLKNGGPSSGA | SEQ ID |
| | PPPS-(NH₂) | NO: 1076 |
| B77 | H(Aib)EGTFTSDLSKQYEKEAARKFISWLKNGGPSSGA | SEQ ID |
| | PPPS-(NH₂) | NO: 1077 |
| B78 | H(Aib)EGTFTSDLSKQYEKEAVREFISWLKNGGPSSGA | SEQ ID |
| | PPPS-(NH₂) | NO: 1078 |
| B79 | H(Aib)EGTFTSDVSEQYEKEAAREFIEWLKNGGPSSGA | SEQ ID |
| | PPPS-(NH₂) | NO: 1079 |
| B80 | H(Aib)EGTFTSDISEQYEKEAAREFIEWLKNGGPSSGAP | SEQ ID |
| | PPS-(NH₂) | NO: 1080 |
| B81 | H(Aib)EGTFTNDLSEQYEKEAAREFIEWLKNGGPSSGA | SEQ ID |
| | PPPS-(NH₂) | NO: 1081 |
| B82 | H(Aib)EGTFTNDVSEQYEKEAAREFIEWLKNGGPSSGA | SEQ ID |
| | PPPS-(NH₂) | NO: 1082 |
| B83 | H(Aib)EGTFTNDISEQYEKEAAREFIEWLKNGGPSSGA | SEQ ID |
| | PPPS-(NH₂) | NO: 1083 |
| B84 | H(Aib)EGTFSSDLSEQYEKEAAREFIEWLKNGGPSSGA | SEQ ID |
| | PPPS-(NH₂) | NO: 1084 |
| B85 | H(Aib)EGTFTSDVSKQYEKEAARLFISWLKNGGPSSGA | SEQ ID |
| | PPPS-(NH₂) | NO: 1085 |
| B86 | H(Aib)EGTFTSDISKQYEKEAARLFISWLKNGGPSSGAP | SEQ ID |
| | PPS-(NH₂) | NO: 1086 |
| B87 | H(Aib)EGTFTNDLSKQYEKEAARLFISWLKNGGPSSGA | SEQ ID |
| | PPPS-(NH₂) | NO: 1087 |
| B88 | H(Aib)EGTFTNDVSKQYEKEAARLFISWLKNGGPSSGA | SEQ ID |
| | PPPS-(NH₂) | NO: 1088 |
| B89 | H(Aib)EGTFTNDISKQYEKEAARLFISWLKNGGPSSGA | SEQ ID |
| | PPPS-(NH₂) | NO: 1089 |
| B90 | H(Aib)EGTFTSDLSKQYEKKAVREFISWLKNGGPSSGA | SEQ ID |
| | PPPS-(NH₂) | NO: 1090 |
| B91 | H(Aib)EGTFTSDLSKQYEKKAARLFISWLKNGGPSSGA | SEQ ID |
| | PPPS-(NH₂) | NO: 1091 |
| B92 | H(Aib)EGTFTSDLSKQYEKKYVRLFISWLKNGGPSSGA | SEQ ID |
| | PPPS-(NH₂) | NO: 1092 |
| B93 | H(Aib)EGTFTSDLSKQYEKKYARLFISWLKNGGPSSGA | SEQ ID |
| | PPPS-(NH₂) | NO: 1093 |
| B94 | H(Aib)EGTFTSDLSKQYEKKYAREFISWLKNGGPSSGA | SEQ ID |
| | PPPS-(NH₂) | NO: 1094 |
| B95 | H(Aib)EGTFTSDLSKQYEKKYAEEFISWLKNGGPSSGA | SEQ ID |
| | PPPS-(NH₂) | NO: 1095 |
| B96 | H(Aib)EGTFTSDLSKQYEKEAVRQFISWLKNGGPSSGA | SEQ ID |
| | PPPS-(NH₂) | NO: 1096 |
| B97 | H(Aib)EGTFTSDLSKQYEKEYAREFISWLKNGGPSSGA | SEQ ID |
| | PPPS-(NH₂) | NO: 1097 |
| B98 | H(Aib)EGTFTSDLSKQYEKKAAREFISWLKNGGPSSGA | SEQ ID |
| | PPPS-(NH₂) | NO: 1098 |
| B99 | H(Aib)EGTFTSDLSKQYEKKSAREFISWLKNGGPSSGA | SEQ ID |
| | PPPS-(NH₂) | NO: 1099 |
| B100 | H(Aib)EGTFTSDLSKQYEKQAAREFISWLKNGGPSSGA | SEQ ID |
| | PPPS-(NH₂) | NO: 1100 |
| B101 | H(Aib)EGTFTSDLSKQYEKQYAREFISWLKNGGPSSGA | SEQ ID |
| | PPPS-(NH₂) | NO: 1101 |
| B102 | H(Aib)EGTFTSDLSKQYEKQSAREFISWLKNGGPSSGA | SEQ ID |
| | PPPS-(NH₂) | NO: 1102 |
| B103 | H(Aib)EGTFTNDVSKQYEKEAAREFISWLKNGGPSSGA | SEQ ID |
| | PPPS-(NH₂) | NO: 1103 |
| B104 | H(Aib)EGTFTNDVSKQYEKEAVREFISWLKNGGPSSGA | SEQ ID |
| | PPPS-(NH₂) | NO: 1104 |
| B105 | H(Aib)EGTFTSDISKQYEKEAVRQFIEWLKNGGPSSGA | SEQ ID |
| | PPPS-(NH₂) | NO: 1105 |
| B106 | H(Aib)EGTFTSDISKQYEKEAARQFIEWLKNGGPSSGA | SEQ ID |
| | PPPS-(NH₂) | NO: 1106 |
| B107 | H(Aib)EGTFTNDISKQYEKEAAREFISWLKNGGPSSGA | SEQ ID |
| | PPPS-(NH₂) | NO: 1107 |
| B108 | H(Aib)EGTFTNDISKQYEKEAVREFISWLKNGGPSSGA | SEQ ID |
| | PPPS-(NH₂) | NO: 1108 |
| B109 | H(Aib)EGTFTNDISKQYEKEAVRQFIEWLKNGGPSSGA | SEQ ID |
| | PPPS-(NH₂) | NO: 1109 |
| B110 | H(Aib)EGTFTNDISKQYEKEAARQFIEWLKNGGPSSGA | SEQ ID |
| | PPPS-(NH₂) | NO: 1110 |
| B111 | H(Aib)EGTFTSDISKQYEKEAARKFISWLKNGGPSSGA | SEQ ID |
| | PPPS-(NH₂) | NO: 1111 |
| B112 | H(Aib)EGTFTNDISKQYEKEAARKFISWLKNGGPSSGA | SEQ ID |
| | PPPS-(NH₂) | NO: 1112 |
| B113 | H(Aib)EGTFTNDLSKQYEKEAARKFISWLKNGGPSSGA | SEQ ID |
| | PPPS-(NH₂) | NO: 1113 |
| B114 | H(Aib)EGTFTNDVSKQYEKEAARKFISWLKNGGPSSG | SEQ ID |
| | APPPS-(NH₂) | NO: 1114 |
| B115 | H(Aib)EGTFTSDVSKQYEKEAARKFISWLKNGGPSSGA | SEQ ID |
| | PPPS-(NH₂) | NO: 1115 |
| B116 | H(Aib)EGTFTNDISKQYEKEYAREFISWLKNGGPSSGA | SEQ ID |
| | PPPS-(NH₂) | NO: 1116 |
| B119 | H(Aib)EGTFTSDLSKQYEKEAAREFISWLKKGGPSSGA | SEQ ID |
| | PPPS-(NH₂) | NO: 1119 |
| B120 | H(Aib)EGTFTSDLSKQYEKEAAKKFIEWLKNGGPSSGA | SEQ ID |
| | PPPS-(NH₂) | NO: 1120 |
| B121 | H(Aib)EGTFTSDLSKQYEKEAAEEFIKWLKNGGPSSGA | SEQ ID |
| | PPPS-(NH₂) | NO: 1121 |
| B122 | H(Aib)EGTFTSDLSKQMEEEAVRKFISWLKNGGPSSGA | SEQ ID |
| | PPPS-(NH₂) | NO: 1122 |
| B123 | H(Aib)EGTFTSDLSKQYEEEAVKEFISWLKNGGPSSGA | SEQ ID |
| | PPPS-(NH₂) | NO: 1123 |
| B124 | H(Aib)EGTFTSDLSKQMEEEAVKEFISWLKNGGPSSGA | SEQ ID |
| | PPPS-(NH₂) | NO: 1124 |
| B125 | H(Aib)EGTFTSDLSKQMEEEAKREFISWLKNGGPSSGA | SEQ ID |
| | PPPS-(NH₂) | NO: 1125 |
| B127 | H(Aib)EGTFTSDLSKQYEEEAAKKFISWLKNGGPSSGA | SEQ ID |
| | PPPS-(NH₂) | NO: 1127 |
| B128 | H(Aib)EGTFTSDLSKQYEEKYAKEFISWLKNGGPSSGA | SEQ ID |
| | PPPS-(NH₂) | NO: 1128 |
| B129 | H(Aib)EGTFTSDLSKQYEEKYKKEFISWLKNGGPSSGA | SEQ ID |
| | PPPS-(NH₂) | NO: 1129 |
| B130 | H(Aib)EGTFTSDLSKQYEEEAVKEFISWLKQGGPSSGA | SEQ ID |
| | PPPS-(NH₂) | NO: 1130 |
| B131 | H(Aib)EGTFTSDLSKQYEEEAAKKFISWLKQGGPSSGA | SEQ ID |
| | PPPS-(NH₂) | NO: 1131 |
| B132 | H(Aib)EGTFTSDVSKQYEKEAVRKFISWLKNGGPSSGA | SEQ ID |
| | PPPS-(NH₂) | NO: 1132 |
| B133 | H(Aib)EGTFTSDISKQYEKEAVREFISWLKNGGPSSGAP | SEQ ID |
| | PPS-(NH₂) | NO: 1133 |
| B134 | H(Aib)EGTFTSDISKQYEKEAVRKFISWLKNGGPSSGA | SEQ ID |
| | PPPS-(NH₂) | NO: 1134 |
| B135 | H(Aib)EGTFTSDVSKQYEKEAVKKFIEWLKNGGPSSG | SEQ ID |
| | APPPS-(NH₂) | NO: 1135 |
| B136 | H(Aib)EGTFTSDISKQYEKEAVKEFIEWLKNGGPSSGA | SEQ ID |
| | PPPS-(NH₂) | NO: 1136 |
| B137 | H(Aib)EGTFTSDVSKQYEKEAAKKFIEWLKNGGPSSG | SEQ ID |
| | APPPS-(NH₂) | NO: 1137 |
| B138 | H(Aib)EGTFTSDVSKQYEKEAAKKFIEWLKQGGPSSG | SEQ ID |
| | APPPS-(NH₂) | NO: 1138 |
| B139 | H(Aib)EGTFTSDVSKQYEKEAARKFISWLKQGGPSSGA | SEQ ID |
| | PPPS-(NH₂) | NO: 1139 |
| B140 | H(Aib)EGTFTSDVSKQYEKEAVKKFIEWLKQGGPSSG | SEQ ID |
| | APPPS-(NH₂) | NO: 1140 |
| B141 | H(Aib)EGTFTSDVSKQYEKKAAREFISWLKNGGPSSGA | SEQ ID |
| | PPPS-(NH₂) | NO: 1141 |
| B142 | H(Aib)EGTFTSDLSKQYEKEAVRKFIEWLKNGGPSSGA | SEQ ID |
| | PPPS-(NH₂) | NO: 1142 |
| B145 | H(Aib)EGTFTSDLSKQYEKEAVRLFIEWLKNGGPHSGA | SEQ ID |
| | PPPS-(NH₂) | NO: 1145 |
| B148 | H(Aib)EGTFTSDLSKQYEKEAARKFIEWLKNGGPSSGA | SEQ ID |
| | PPPS-(NH₂) | NO: 1148 |
| B151 | H(Aib)EGTFTSDLSKQYEKEAVRKFIEWLKNGGPHSG | SEQ ID |
| | APPPS-(NH₂) | NO: 1151 |
| B152 | H(Aib)EGTFTSDLSKQYEKEAVREFIEWLKNGGPHSGA | SEQ ID |
| | PPPS-(NH₂) | NO: 1152 |
| B153 | H(Aib)EGTFTSDLSKQYEKEAVRQFIEWLKNGGPHSG | SEQ ID |
| | APPPS-(NH₂) | NO: 1153 |
| B154 | H(Aib)EGTFTSDLSKQYEKEAAREFIEWLKNGGPHSGA | SEQ ID |
| | PPPS-(NH₂) | NO: 1154 |
| B155 | H(Aib)EGTFTSDLSKQYEKEAARQFIEWLKNGGPHSG | SEQ ID |
| | APPPS-(NH₂) | NO: 1155 |
| B156 | H(Aib)EGTFTSDLSKQYEKEAVRLFISWLKNGGPHSGA | SEQ ID |
| | PPPS-(NH₂) | NO: 1156 |
| B157 | H(Aib)EGTFTSDLSKQYEKEAAREFISWLKNGGPSSGA | SEQ ID |
| | PPPS-(NH₂) | NO: 1157 |
| B158 | H(Aib)EGTFTSDLSKQYEKEAVRKFISWLKNGGPSSGA | SEQ ID |
| | PPPS-(NH₂) | NO: 1158 |
| B159 | H(Aib)EGTFTSDLSEQYE(Dap)EAAREFIEWLKNGGPSS | SEQ ID |
| | GAPPPS-(NH₂) | NO: 1159 |
| B160 | H(Aib)EGTFTSDLSEQYE(Dap)EAARLFIEWLKNGGPSS | SEQ ID |
| | GAPPPS-(NH₂) | NO: 1160 |
| B161 | H(Aib)EGTFTSDLSEQYEKEAARLFIEWLKNGGPSSGA | SEQ ID |
| | PPPS-(NH₂) | NO: 1161 |
| B162 | H(Aib)EGTFTEDLSKQYEK | SEQ ID |
| | EAVRLFISWLKNGGPSSGAPPPS-(NH₂) | NO: 1162 |

[0866] In some embodiments, the isolated polypeptide comprises an amino acid sequence selected from the group consisting of SEQ ID NOs: 1000 to 1162. or a pharmaceutically acceptable salt thereof.

[0867] In some embodiments, the isolated polypeptide comprises an amino acid sequence selected form the group consisting of SEQ ID NOS: 1006, 1045, 1046, 1054, 1055, 1062, 1068, 1070, 1071, 1074, 1075, 1077, 1078, 1085, 1086, 1087, 1088, 1089, 1092, 1094, 1103, 1107, 1108, 1111, 1112, 1114, 1115, 1120, 1132, 1134, 1139, 1147, and 1149.

[0868] In some embodiments, the isolated polypeptide comprises an amino acid sequence selected from the group consisting of SEQ ID NOs: 1006, 1045, 1046, 1054, 1055, 1077, 1078, 1108, 1111, 1112, 1114, 1115, 1120, 1132, 1134, and 1139 or a pharmaceutically acceptable salt thereof.

[0869] In some embodiments, the isolated polypeptide comprises an amino acid sequence selected from the group consisting of SEQ ID NOs: 1055, 1115, 1120 and 1132 or a pharmaceutically acceptable salt thereof.

[0870] In some embodiments, the isolated polypeptide comprises an amino acid sequence of SEQ ID NO: 1055 or a pharmaceutically acceptable salt thereof. In some embodiments, the isolated polypeptide comprises an amino acid sequence of SEQ ID NO: 1115 or a pharmaceutically acceptable salt thereof. In some embodiments, the isolated polypeptide comprises an amino acid sequence of SEQ ID NO: 1120 or a pharmaceutically acceptable salt thereof. In some embodiments, the isolated polypeptide comprises an amino acid sequence of SEQ ID NO: 1132 or a pharmaceutically acceptable salt thereof.

[0871] In some embodiments, the present invention provides a compound set forth in the Table 6, above, or a pharmaceutically acceptable salt thereof. In some embodiments, the present invention provides an isolated polypeptide that comprises an amino acid sequence selected from the group consisting of SEQ ID NOs: 1000 to 1162 or a pharmaceutically acceptable salt thereof. In some embodiments the pharmaceutically acceptable salt is an acetate salt. In some embodiments the pharmaceutically acceptable salt is a trifluoroacetic acid (TFA) salt. In some embodiments the pharmaceutically acceptable salt is a hydrochloric acid (HCl) salt.

[0872] In one embodiment, the compound is the isolated polypeptide comprising an amino acid sequence of SEQ ID NO: 1055 or a pharmaceutically acceptable salt thereof. In some embodiments, the compound is the acetate salt of the isolated polypeptide comprising an amino acid sequence of SEQ ID NO: 1055. In some embodiments, the compound is the TFA salt of the isolated polypeptide comprising an amino acid sequence of SEQ ID NO: 1055. In some embodiments, the compound is the HCl salt of the isolated polypeptide comprising an amino acid sequence of SEQ ID NO: 1055.

[0873] In one embodiment, the compound is the isolated polypeptide comprising an amino acid sequence of SEQ ID NO: 1115 or a pharmaceutically acceptable salt thereof. In some embodiments, the compound is the acetate salt of the isolated polypeptide comprising an amino acid sequence of SEQ ID NO: 1115. In some embodiments, the compound is the TFA salt of the isolated polypeptide comprising an amino acid sequence of SEQ ID NO: 1115. In some embodiments, the compound is the HCl salt of the isolated polypeptide comprising an amino acid sequence of SEQ ID NO: 1115.

[0874] In one embodiment, the compound is the isolated polypeptide comprising an amino acid sequence of SEQ ID NO: 1120 or a pharmaceutically acceptable salt thereof. In some embodiments, the compound is the acetate salt of the isolated polypeptide comprising an amino acid sequence of SEQ ID NO: 1120. In some embodiments, the compound is the TFA salt of the isolated polypeptide comprising an amino acid sequence of SEQ ID NO: 1120. In some embodiments, the compound is the HCl salt of the isolated polypeptide comprising an amino acid sequence of SEQ ID NO: 1120.

[0875] In one embodiment, the compound is the isolated polypeptide comprising an amino acid sequence of SEQ ID NO: 1132 or a pharmaceutically acceptable salt thereof. In some embodiments, the compound is the acetate salt of the isolated polypeptide comprising an amino acid sequence of SEQ ID NO: 1132. In some embodiments, the compound is the TFA salt of the isolated polypeptide comprising an amino acid sequence of SEQ ID NO: 1132. In some embodiments, the compound is the HCl salt of the isolated polypeptide comprising an amino acid sequence of SEQ ID NO: 1132.

TABLE 7
Exemplary compounds: GLP-1 receptor agonist polypeptides optionally
covalently bound to a lipophilic substituent, optionally via a spacer

| Compound | | |
|---|---|---|
| No. | Sequence | SEQ ID NO: |
| C117 | H(Aib)EGTFTSDLSKQYEKE⁺AARK⁺FISWLKNGGPSSGAPPPS-(NH₂) | SEQ ID NO: 2117 |
| C118 | H(Aib)EGTFTSDLSKQYEKK⁺AARE⁺FISWLKNGGPSSGAPPPS-(NH₂) | SEQ ID NO: 2118 |
| C119 | H(Aib)EGTFTSDLSKQYEKEAARE⁺FISWLKK⁺GGPSSGAPPPS-(NH₂) | SEQ ID NO: 2119 |
| C120 | H(Aib)EGTFTSDLSKQYEKEAAK⁺KFIE⁺WLKNGGPSSGAPPPS-(NH₂) | SEQ ID NO: 2120 |
| C121 | H(Aib)EGTFTSDLSKQYEKEAAE⁺EFIK⁺WLKNGGPSSGAPPPS-(NH₂) | SEQ ID NO: 2121 |
| C135 | H(Aib)EGTFTSDVSKQYEKEAVK⁺KFIE⁺WLKNGGPSSGAPPPS-(NH₂) | SEQ ID NO: 2135 |
| C136 | H(Aib)EGTFTSDISKQYEKEAVK⁺EFIE⁺WLKNGGPSSGAPPPS-(NH₂) | SEQ ID NO: 2136 |
| C137 | H(Aib)EGTFTSDVSKQYEKEAAK⁺KFIE⁺WLKNGGPSSGAPPPS-(NH₂) | SEQ ID NO: 2137 |
| C138 | H(Aib)EGTFTSDVSKQYEKEAAK⁺KFIE⁺WLKQGGPSSGAPPPS-(NH₂) | SEQ ID NO: 2138 |
| C140 | H(Aib)EGTFTSDVSKQYEKEAVK⁺KFIE⁺WLKQGGPSSGAPPPS-(NH₂) | SEQ ID NO: 2140 |
| C141 | H(Aib)EGTFTSDVSKQYEKK⁺AARE⁺FISWLKNGGPSSGAPPPS-(NH₂) | SEQ ID NO: 2141 |

Note:
Each pairing of K+ and E+ represents a covalent amide linkage derived from the amino sidechain of K+ and the carboxy sidechain of E+ (with loss of a water molecule).

[0876] In some embodiments, the isolated polypeptide comprises an amino acid sequence selected from the group consisting of SEQ ID NOs: 2117, 2118, 2119, 2120, 2121, 2135, 2136, 2137, 2138, 2140 and 2141 or a pharmaceutically acceptable salt thereof.

[0877] In some embodiments, the isolated polypeptide comprises an amino acid sequence of SEQ ID NO: 2117 or a pharmaceutically acceptable salt thereof. In some embodiments, the isolated polypeptide comprises an amino acid sequence of SEQ ID NO: 2118 or a pharmaceutically acceptable salt thereof. In some embodiments, the isolated polypeptide comprises an amino acid sequence of SEQ ID NO: 2119 or a pharmaceutically acceptable salt thereof. In some embodiments, the isolated polypeptide comprises an amino acid sequence of SEQ ID NO: 2120 or a pharmaceutically acceptable salt thereof. In some embodiments, the isolated polypeptide comprises an amino acid sequence of SEQ ID NO: 2121 or a pharmaceutically acceptable salt thereof. In some embodiments, the isolated polypeptide comprises an amino acid sequence of SEQ ID NO: 2135 or a pharmaceutically acceptable salt thereof. In some embodiments, the isolated polypeptide comprises an amino acid sequence of SEQ ID NO: 2136 or a pharmaceutically acceptable salt thereof. In some embodiments, the isolated polypeptide comprises an amino acid sequence of SEQ ID NO: 2137 or a pharmaceutically acceptable salt thereof. In some embodiments, the isolated polypeptide comprises an amino acid sequence of SEQ ID NO: 2138 or a pharmaceutically acceptable salt thereof. In some embodiments, the isolated polypeptide comprises an amino acid sequence of SEQ ID NO: 2140 or a pharmaceutically acceptable salt thereof. In some embodiments, the isolated polypeptide comprises an amino acid sequence of SEQ ID NO: 2141 or a pharmaceutically acceptable salt thereof.

[0878] In some embodiments the pharmaceutically acceptable salt is an acetate salt. In some embodiments the pharmaceutically acceptable salt is a trifluoroacetic acid (TFA) salt. In some embodiments the pharmaceutically acceptable salt is a hydrochloric acid (HCl) salt.

### Polypeptide Intermediates & General Methods of Providing the Present Compounds

[0879] The compounds of this invention may be prepared or isolated in general by synthetic and/or semi-synthetic methods known to those skilled in the art for analogous compounds and by methods described in detail in the Examples, herein.

[0880] In the Schemes below, where a particular protecting group (“PG”), leaving group (“LG”), or transformation condition is depicted, one of ordinary skill in the art will appreciate that other protecting groups, leaving groups, and transformation conditions are also suitable and are contemplated. Such groups and transformations are described in detail in March's Advanced Organic Chemistry: Reactions, Mechanisms, and Structure, M. B. Smith and J. March, 5^{th} Edition, John Wiley & Sons, 2001, Comprehensive Organic Transformations, R. C. Larock, 2^{nd} Edition, John Wiley & Sons, 1999, and Protecting Groups in Organic Synthesis, T. W. Greene and P. G. M. Wuts, 3^{rd} edition, John Wiley & Sons, 1999, the entirety of each of which is hereby incorporated herein by reference.

[0881] As used herein, the phrase “leaving group” (LG) includes, but is not limited to, halogens (e.g. fluoride, chloride, bromide, iodide), sulfonates (e.g. mesylate, tosylate, benzenesulfonate, brosylate, nosylate, triflate), diazonium, and the like.

[0882] As used herein, the phrase “oxygen protecting group” includes, for example, carbonyl protecting groups, hydroxyl protecting groups, etc. Hydroxyl protecting groups are well known in the art and include those described in detail in Protecting Groups in Organic Synthesis, T. W. Greene and P. G. M. Wuts, 3^{rd} edition, John Wiley & Sons, 1999, the entirety of which is incorporated herein by reference. Examples of suitable hydroxyl protecting groups include, but are not limited to, esters (e.g., acetyl, benzyl), allyl ethers, ethers, silyl ethers, alkyl ethers, arylalkyl ethers, benzyl ethers and alkoxyalkyl ethers. Examples of such esters include formates, acetates, carbonates, and sulfonates. Specific examples include formate, benzoyl formate, chloroacetate, trifluoroacetate, methoxyacetate, triphenylmethoxyacetate, p-chlorophenoxyacetate, 3-phenylpropionate, 4-oxopentanoate, 4,4-(ethylenedithio)pentanoate, pivaloate (trimethylacetyl), crotonate, 4-methoxy-crotonate, benzoate, p-benylbenzoate, 2,4,6-trimethylbenzoate, carbonates such as methyl, 9-fluorenylmethyl, ethyl, 2,2,2-trichloroethyl, 2-(trimethylsilyl)ethyl, 2-(phenylsulfonyl)ethyl, vinyl, allyl, and p-nitrobenzyl. Examples of such silyl ethers include trimethylsilyl, triethylsilyl, t-butyldimethylsilyl, t-butyldiphenylsilyl, triisopropylsilyl, and other trialkylsilyl ethers. Alkyl ethers include methyl, benzyl, p-methoxybenzyl, 3,4-dimethoxybenzyl, trityl, t-butyl, allyl, and allyloxycarbonyl ethers or derivatives. Alkoxyalkyl ethers include acetals such as methoxymethyl, methylthiomethyl, (2-methoxyethoxy)methyl, benzyloxymethyl, beta-(trimethylsilyl)ethoxymethyl, and tetrahydropyranyl ethers. Examples of arylalkyl ethers include benzyl, p-methoxybenzyl (MPM), 3,4-dimethoxybenzyl, O-nitrobenzyl, p-nitrobenzyl, p-halobenzyl, 2,6-dichlorobenzyl, p-cyanobenzyl, and 2- and 4-picolyl.

[0883] Amino protecting groups are well known in the art and include those described in detail in Protecting Groups in Organic Synthesis, T. W. Greene and P. G. M. Wuts, 3^{rd} edition, John Wiley & Sons, 1999, the entirety of which is incorporated herein by reference. Suitable amino protecting groups include, but are not limited to, aralkylamines, carbamates, cyclic imides, allyl amines, amides, and the like. Examples of such groups include t-butyloxycarbonyl (Boc), ethyloxycarbonyl, methyloxycarbonyl, trichloroethyloxycarbonyl, allyloxycarbonyl (Alloc), benzyloxocarbonyl (Cbz), allyl, phthalimide, benzyl (Bn), dimethyl-2,6-dioxocyclohex-1-ylidene)ethyl (Dmb), 1-(4,4-dimethyl-2,6-dioxocyclohex-1-ylidene)-3-methylbutyl (ivDde), fluorenylmethylcarbonyl (Fmoc), formyl, acetyl, chloroacetyl, dichloroacetyl, trichloroacetyl, phenylacetyl, trifluoroacetyl, benzoyl, and the like.

[0884] In certain embodiments, the present invention also relates to synthetic peptide intermediates of disclosed GLP-1 receptor agonists. In some embodiments, a polypeptide intermediate of the disclosure is an isolated polypeptide comprising the amino acid sequence of SEQ ID NO: 400: HX₂X₃GTX₆X₇X₈X₉X₁₀SX₁₂X₁₃X₁₄EX₁₆X₁₇X₁₈X₁₉X₂₀X₂₁FIX₂₄WLKX₂₈GGPX₃₂SGAPPPS-(OH/NH₂) (SEQ ID NO: 400) or a pharmaceutically acceptable salt thereof, wherein:
[0885] X₂ is A, 2-aminoisobutyric acid (Aib), or G;
[0886] X₃ is E or N-methyl Glu;
[0887] X₆ is F or Y;
[0888] X₇ is S or T;
[0889] X₈ is diaminopimelic acid (Dap), E, K, N, N-methyl Ser, Q, S, s, or Y;
[0890] X₉ is D or E;
[0891] X₁₀ is I, L, N-methyl Leu, or V;
[0892] X₁₂ is E, K, Q, or S;
[0893] X₁₃ is Aib, E, K, Q, S, W, or Y;
[0894] X₁₄ is E, R, I, K, L, M, Q, or Y;
[0895] X₁₆ is 2,4-diaminobutanoic acid (Dab), Dap, E, K, k, or ornithine (Orn);
[0896] X₁₇ is E, K, or Q;
[0897] X₁₈ is A, K, S, or Y;
[0898] X₁₉ is A, K, or V;
[0899] X₂₀ is E, K, or R;
[0900] X₂₁ is Aib, E, H, K, L, Q, or Y;
[0901] X₂₄ is A, Aib, E, K, Q, S, or Y;
[0902] X₂₈ is D, E, K, N, Q, S, or Y; and
[0903] X₃₂ is Dap, H, K, R, or S;
[0904] wherein each Dab, Dap, K or Orn independently represents Dab, Dap, K or Orn optionally covalently bound to a protecting group or a spacer optionally bound to a protecting group.

[0905] In some embodiments, the spacer is not bound to a protecting group.

[0906] In one embodiment, the synthetic peptide intermediate is not a precursor of exenatide, HGEGTFTSDLSKQMEEEAVRLFIEWLKNGGPSSGAPPPS-NH₂ (SEQ ID NO: 300), having K₁₂ or K₂₇ covalently bound to a protecting group or a spacer optionally bound to a protecting group.

[0907] In some embodiments, X₂ is Aib.

[0908] In some embodiments, if X₂₄ is S, then X₁₀ is V.

[0909] In some embodiments, X₁₄ is Y.

[0910] In some embodiments, X₁₄ is M, and X₁₆ is K.

[0911] In some embodiments, X₁₆ is K.

[0912] In some embodiments, if X₁₆ is E, then X₂₁ is K or E. In some embodiments, if X₁₆ is E, then X₂₁ is K. In some embodiments, if X₁₆ is E, then X₂₁ is E.

[0913] In some embodiments, X₂ is A. In some embodiments, X₂ is Aib. In some embodiments, X₂ is G.

[0914] In some embodiments, X₃ is E. In some embodiments, X₃ is N-methyl Glu.

[0915] In some embodiments, X₆ is F. In some embodiments, X₆ is Y.

[0916] In some embodiments, X₇ is S. In some embodiments, X₇ is T.

[0917] In some embodiments, X₈ is Dap. In some embodiments, X₈ is E. In some embodiments, X₈ is K. In some embodiments, X₈ is N. In some embodiments, X₈ is N-methyl Ser. In some embodiments, X₈ is Q. In some embodiments, X₈ is S. In some embodiments, X₈ is s. In some embodiments, X₈ is Y.

[0918] In some embodiments, X₉ is D. In some embodiments, X₉ is E.

[0919] In some embodiments, X₁₀ is I. In some embodiments, X₁₀ is L. In some embodiments, X₁₀ is N-methyl Leu. In some embodiments, X₁₀ is V.

[0920] In some embodiments, X₁₂ is E. In some embodiments, X₁₂ is K. In some embodiments, X₁₂ is Q. In some embodiments, X₁₂ is S.

[0921] In some embodiments, X₁₃ is Aib. In some embodiments, X₁₃ is E. In some embodiments, X₁₃ is K. In some embodiments, X₁₃ is Q. In some embodiments, X₁₃ is S. In some embodiments, X₁₃ is W. In some embodiments, X₁₃ is Y.

[0922] In some embodiments, X₁₄ is E. In some embodiments, X₁₄ is R. In some embodiments, X₁₄ is I. In some embodiments, X₁₄ is K. In some embodiments, X₁₄ is L. In some embodiments, X₁₄ is M. In some embodiments, X₁₄ is Q. In some embodiments, X₁₄ is Y.

[0923] In some embodiments, X₁₆ is Dab. In some embodiments, X₁₆ is Dap. In some embodiments, X₁₆ is E. In some embodiments, X₁₆ is K. In some embodiments, X₁₆ is k. In some embodiments, X₁₆ is Orn.

[0924] In some embodiments, X₁₇ is E. In some embodiments, X₁₇ is K. In some embodiments, X₁₇ is Q.

[0925] In some embodiments, X₁₈ is A. In some embodiments, X₁₈ is K. In some embodiments, X₁₈ is S. In some embodiments, X₁₈ is Y.

[0926] In some embodiments, X₁₉ is A. In some embodiments, X₁₉ is K. In some embodiments, X₁₉ is V.

[0927] In some embodiments, X₂₀ is E. In some embodiments, X₂₀ is K. In some embodiments, X₂₀ is R.

[0928] In some embodiments, X₂₁ is Aib. In some embodiments, X₂₁ is E. In some embodiments, X₂₁ is H. In some embodiments, X₂₁ is K. In some embodiments, X₂₁ is L. In some embodiments, X₂₁ is Q. In some embodiments, X₂₁ is Y.

[0929] In some embodiments, X₂₄ is A. In some embodiments, X₂₄ is Aib. In some embodiments, X₂₄ is E. In some embodiments, X₂₄ is K. In some embodiments, X₂₄ is Q. In some embodiments, X₂₄ is S. In some embodiments, X₂₄ is Y.

[0930] In some embodiments, X₂₈ is D. In some embodiments, X₂₈ is E. In some embodiments, X₂₈ is K. In some embodiments, X₂₈ is N. In some embodiments, X₂₈ is Q. In some embodiments, X₂₈ is S. In some embodiments, X₂₈ is Y.

[0931] In some embodiments, X₃₂ is Dap. In some embodiments, X₃₂ is H. In some embodiments, X₃₂ is K. In some embodiments, X₃₂ is R. In some embodiments, X₃₂ is S.

[0932] In some embodiments, carboxy terminal amino acid, i.e. S₃₉, is —S₃₉—(NH₂). In some embodiments, carboxy terminal amino acid S₃₉ is —S₃₉—(OH).

[0933] In some embodiments, a polypeptide intermediate of the disclosure is an isolated polypeptide comprising the amino acid sequence of SEQ ID NO: 405: HX₂EGTFTX₈DX₁₀SX₁₂QYEKX₁₇X₁₈X₁₉X₂₀X₂₁FIX₂₄WLKX₂₈GGPX₃₂SGAPPPS-(OH/NH₂) (SEQ ID NO: 405), or a pharmaceutically acceptable salt thereof, wherein:
[0934] X₂ is 2-aminoisobutyric acid (Aib) or G;
[0935] X₈ is N or S;
[0936] X₁₀ is I, L, or V;
[0937] X₁₂ is E, K, or Q;
[0938] X₁₇ is E or K;
[0939] X₁₈ is A or Y;
[0940] X₁₉ is A or V;
[0941] X₂₀ is E, K, or R;
[0942] X₂₁ is E, K, L, or Q;
[0943] X₂₄ is E, K, or S;
[0944] X₂₈ is N or Q; and
[0945] X₃₂ is H or S;
[0946] wherein each K represents lysine optionally covalently bound to a protecting group or a spacer optionally bound to a protecting group.

[0947] In some embodiments, the spacer is not bound to a protecting group.

[0948] In some embodiments, X₂ is Aib.

[0949] In some embodiments, the lysine residue at the sixteenth position of SEQ ID NO: 405 is covalently bound to a protecting group or a spacer optionally bound to a protecting group.

[0950] In some embodiments, if X₂₄ is S, then X₁₀ is V.

[0951] In some embodiments, the peptide further comprises a lactam bridge formed via an amide bond between the side chains of a lysine and a glutamic acid at positions X₂₀ and X₂₄, respectively.

[0952] In some embodiments, X₂ is Aib. In some embodiments, X₂ is G.

[0953] In some embodiments, X₈ is N. In some embodiments, X₈ is S.

[0954] In some embodiments, X₁₀ is I. In some embodiments, X₁₀ is L. In some embodiments, X₁₀ is V.

[0955] In some embodiments, X₁₂ is E. In some embodiments, X₁₂ is K. In some embodiments, X₁₂ is Q.

[0956] In some embodiments, X₁₇ is E. In some embodiments, X₁₇ is K.

[0957] In some embodiments, X₁₈ is A. In some embodiments, X₁₈ is Y.

[0958] In some embodiments, X₁₉ is A. In some embodiments, X₁₉ is V.

[0959] In some embodiments, X₂₀ is E. In some embodiments, X₂₀ is K. In some embodiments, X₂₀ is R.

[0960] In some embodiments, X₂₁ is E. In some embodiments, X₂₁ is K. In some embodiments, X₂₁ is L. In some embodiments, X₂₁ is Q.

[0961] In some embodiments, X₂₄ is E. In some embodiments, X₂₄ is K. In some embodiments, X₂₄ is S.

[0962] In some embodiments, X₂₈ is N. In some embodiments, X₂₈ is Q.

[0963] In some embodiments, X₃₂ is H. In some embodiments, X₃₂ is S.

[0964] In some embodiments, carboxy terminal amino acid, i.e. S₃₉, is —S₃₉—(NH₂). In some embodiments, carboxy terminal amino acid S₃₉ is —S₃₉—(OH).

### Exemplary Polypeptide Intermediates

[0965] In some embodiments, an isolated polypeptide of the disclosure comprises an amino acid sequence selected form the group consisting of the following peptides listed in Tables 8 and 9:

TABLE 8
Compound A120 and exemplary polypeptide intermediates thereof.

| Compound | | SEQ ID |
|---|---|---|
| No. | Sequence | NO: |
| A120 | H(Aib)EGTFTSDLSKQYEK*(γGlu-γGlu-dpeg- | SEQ ID |
| | CO(CH₂)₁₈CO₂H)EAAK⁺KFIE⁺WLKNGGPSSGAPPPS-(NH₂) | NO: 120 |
| D3120 | H(Aib)EGTFTSDLSKQYEK*(γGlu-γGlu- | SEQ ID |
| | dpeg)EAAK⁺KFIE⁺WLKNGGPSSGAPPPS-(NH₂) | NO: 3120 |
| D4120 | H(Aib)EGTFTSDLSKQYEK*(γGlu-γGlu)EAAK⁺KFIE⁺WLKNGGPSSGAPPPS- | SEQ ID |
| | (NH₂) | NO: 4120 |
| D5120 | H(Aib)EGTFTSDLSKQYEK*(γGlu)EAAK⁺KFIE⁺WLKNGGPSSGAPPPS-(NH₂) | SEQ ID |
| | | NO: 5120 |
| D6120 | H(Aib)EGTFTSDLSKQYEK*(free amine)EAAK⁺KFIE⁺WLKNGGPSSGAPPPS- | SEQ ID |
| | (NH₂) | NO: 6120 |
| D7120 | H(Aib)EGTFTSDLSKQYEK*(ivDde)EAAK⁺KFIE⁺WLKNGGPSSGAPPPS-(NH₂) | SEQ ID |
| | | NO: 7120 |
| D8120 | H(Aib)EGTFTSDLSKQYEK*(ivDde)EAAKKFIEWLKNGGPSSGAPPPS-(NH₂) | SEQ ID |
| | | NO: 8120 |
| D9120 | H(Aib)EGTFTSDLSKQYEK*(ivDde)EAAK(Alloc)KFIE(Allyl)WLKNGGPSSGA | SEQ ID |
| | PPPS-(NH₂) | NO: 9120 |

Notes:
Each pairing of K+ and E+ represents a covalent amide linkage derived from the amino sidechain of K+ and the carboxy sidechain of E+ (with loss of a water molecule).
Alloc = allyloxycarbonyl protecting group
Allyl = allyl (CH₂═CH-CH₂-) protecting group
ivDde = 1-(4,4-dimethyl-2,6-dioxocyclohex-1-ylidene)-3-methylbutyl protecting group

[0966] In some embodiments, the present invention provides a peptide intermediate of Compound A120 (SEQ TD NO: 120). In some embodiments, the present invention provides a peptide intermediate set forth in the Table 8, above. In some embodiments, the peptide intermediate is a peptide having the amino acid sequence of SEQ TD NO: 3120. In some embodiments, the peptide intermediate is a peptide having the amino acid sequence of SEQ TD NO: 4120. In some embodiments, the peptide intermediate is a peptide having the amino acid sequence of SEQ TD NO: 5120. In some embodiments, the peptide intermediate is a peptide having the amino acid sequence of SEQ TD NO: 6120. In some embodiments, the peptide intermediate is a peptide having the amino acid sequence of SEQ TD NO: 7120. In some embodiments, the peptide intermediate is a peptide having the amino acid sequence of SEQ ID NO: 8120. In some embodiments, the peptide intermediate is a peptide having the amino acid sequence of SEQ TD NO: 9120.

[0967] In some embodiments, the present invention provides a method for preparing compounds of the invention, such as Compound A120 (SEQ ID NO: 120), comprising the step of acylating a polypeptide intermediates, such as Compound D3120 (SEQ TD NO: 3120), with the following activated acyl group, (LG)CO(CH₂)_{zz}CO₂H, wherein ZZ is from 14 to 22 and LG is a leaving group, as defined herein, as exemplified below in Scheme 1:

[chemical structure]

TABLE 9
Compound A115 and exemplary polypeptide intermediates thereof.

| Compound | | SEQ ID |
|---|---|---|
| No. | Sequence | NO: |
| A115 | H(Aib)EGTFTSDVSKQYEK*(γGlu-γGlu-dpeg- | SEQ ID |
| | CO(CH₂)₁₈CO₂H)EAARKFISWLKNGGPSSGAPPPS-(NH₂) | NO: 115 |
| D3115 | H(Aib)EGTFTSDVSKQYEK*(γGlu-γGlu- | SEQ ID |
| | dpeg)EAARKFISWLKNGGPSSGAPPPS-(NH₂) | NO: 3115 |
| D4115 | H(Aib)EGTFTSDVSKQYEK*(γGlu-γGlu)EAARKFISWLKNGGPSSGAPPPS- | SEQ ID |
| | (NH₂) | NO: 4115 |
| D5115 | H(Aib)EGTFTSDVSKQYEK*(γGlu)EAARKFISWLKNGGPSSGAPPPS-(NH₂) | SEQ ID |
| | | NO: 5115 |
| D6115 | H(Aib)EGTFTSDVSKQYEK*(freeamine)EAARKFISWLKNGGPSSGAPPPS- | SEQ ID |
| | (NH₂) | NO: 6115 |
| D7115 | H(Aib)EGTFTSDVSKQYEK*(Alloc)EAARKFISWLKNGGPSSGAPPPS-(NH₂) | SEQ ID |
| | | NO: 7115 |

[0968] In some embodiments, the present invention provides a peptide intermediate of Compound A115 (SEQ ID NO: 115). In some embodiments, the present invention provides a peptide intermediate set forth in the Table 9, above. In some embodiments, the peptide intermediate is a peptide having the amino acid sequence of SEQ ID NO: 3115. In some embodiments, the peptide intermediate is a peptide having the amino acid sequence of SEQ ID NO: 4115. In some embodiments, the peptide intermediate is a peptide having the amino acid sequence of SEQ ID NO: 5115. In some embodiments, the peptide intermediate is a peptide having the amino acid sequence of SEQ ID NO: 6115. In some embodiments, the peptide intermediate is a peptide having the amino acid sequence of SEQ ID NO: 7115.

[0969] In some embodiments, the present invention provides a method for preparing compounds of the invention, such as Compound A115 (SEQ ID NO: 115), comprising the step of acylating a polypeptide intermediates, such as Compound D3115 (SEQ ID NO: 3115), with the following activated acyl group, (LG)CO(CH₂)_{zz}CO₂H, wherein ZZ is from 14 to 22 and LG is a leaving group, as defined herein, as exemplified below in Scheme 2:

[chemical structure]

### Methods of Use

[0970] According to another embodiment, the invention relates to a method of treating metabolic disease or disorder in a subject in need of treatment, comprising providing the subject with an effective amount of an GLP-1 receptor agonist polypeptide of the disclosure or a pharmaceutical composition thereof. Metabolic diseases or disorders include type 1 diabetes, type 2 diabetes, and obesity. Additionally, the invention relates to a method of effecting weight loss in a subject, including a diabetic subject, comprising providing the subject with an effective amount of an GLP-1 receptor agonist polypeptide of the disclosure. In certain embodiments, the invention also relates to methods of treating nonalcoholic fatty liver disease (NAFLD) and/or nonalcoholic steatohepatitis (NASH).

[0971] In some embodiments, provided is a method of treating obesity in a human subject, providing weight loss to the human subject, or suppressing appetite in the human subject, comprising administering to the subject any of the polypeptides disclosed herein, a pharmaceutical composition comprising any of the disclosed polypeptides, or an osmotic delivery device comprising any of the disclosed polypeptides.

[0972] In some embodiments, provided is a method of treating diabetes in a human subject, comprising administering to the subject any of the polypeptides disclosed herein, a pharmaceutical composition comprising any of the disclosed polypeptides, or an osmotic delivery device comprising any of the disclosed polypeptides. In some embodiments, the diabetes is type 1 diabetes. In some embodiments, the diabetes is type 2 diabetes.

[0973] In some embodiments, provided is a method of treating nonalcoholic fatty liver disease (NAFLD) in a human subject, comprising administering to the subject any of the polypeptides disclosed herein, a pharmaceutical composition comprising any of the disclosed polypeptides, or an osmotic delivery device comprising any of the disclosed polypeptides.

[0974] In some embodiments, provided is a method of treating nonalcoholic steatohepatitis (NASH) in a human subject, comprising administering to the subject any of the polypeptides disclosed herein, a pharmaceutical composition comprising any of the disclosed polypeptides, or an osmotic delivery device comprising any of the disclosed polypeptides.

[0975] GLP-1 receptor agonist polypeptides of the disclosure are particularly useful for the treatment of diabetes, the method comprising providing a diabetic subject with an effective amount of a GLP-1 receptor agonist polypeptide. In some embodiments, a GLP-1 receptor agonist polypeptide of the disclosure is used for the treatment of a subject with type 1 or type 2 diabetes to control, or reduce, concentrations of blood sugar in the subject, where blood sugar levels can be monitored or approximated based on measured blood concentrations of glycated hemoglobin (hemoglobin A1c, HbA1c).
[0976] (i) In some embodiments, a GLP-1 receptor agonist polypeptide of the disclosure is used for the treatment of a subject with type 1 diabetes;
[0977] (ii) In some embodiments, a GLP-1 receptor agonist polypeptide of the disclosure is used for the treatment of a subject with type 2 diabetes;
[0978] (iii) In some embodiments, a GLP-1 receptor agonist polypeptide of the disclosure is used for the treatment of obesity; and
[0979] (iv) In some embodiments, a GLP-1 receptor agonist polypeptide of the disclosure is used to provide weight loss to a subject, such as a diabetic subject,
[0980] (v) In some embodiments, a GLP-1 receptor agonist polypeptide of the disclosure is used for the treatment of nonalcoholic fatty liver disease (NAFLD),
[0981] (vi) In some embodiments, a GLP-1 receptor agonist polypeptide of the disclosure is used for the treatment of nonalcoholic steatohepatitis (NASH),

[0982] wherein the GLP-1 receptor agonist polypeptide of usage (i), (ii), (iii), (iv), (v) or (vi) comprises any isolated polypeptide of this disclosure including those selected from the group consisting of SEQ ID NOS: 6, 45, 46, 54, 55, 77, 78, 108, 111, 112, 114, 115, 120, 132, 134, and 139 or a pharmaceutically acceptable salt thereof.

[0983] In some embodiments, the GLP-1 receptor agonist polypeptide of usage (i), (ii), (iii), (iv), (v) or (vi) comprises any isolated polypeptide of this disclosure including those selected from the group consisting of SEQ ID NOs: 55, 115, 120 and 132 or a pharmaceutically acceptable salt thereof.

[0984] In some embodiments, the GLP-1 receptor agonist polypeptide of usage (i), (ii), (iii), (iv), (v) or (vi) comprises the isolated polypeptide of SEQ ID NO: 55 or a pharmaceutically acceptable salt thereof. In some embodiments, the GLP-1 receptor agonist polypeptide of usage (i), (ii), (iii), (iv), (v) or (vi) comprises the isolated polypeptide of SEQ ID NO: 115 or a pharmaceutically acceptable salt thereof. In some embodiments, the GLP-1 receptor agonist polypeptide of usage (i), (ii), (iii), (iv), (v) or (vi) comprises the isolated polypeptide of SEQ ID NO: 120 or a pharmaceutically acceptable salt thereof. In some embodiments, the GLP-1 receptor agonist polypeptide of usage (i), (ii), (iii), (iv), (v) or (vi) comprises the isolated polypeptide of SEQ ID NO: 132 or a pharmaceutically acceptable salt thereof.

[0985] In some embodiments, the GLP-1 receptor agonist polypeptide is used for the treatment of a subject with type 1 diabetes wherein the isolated polypeptide is of SEQ ID NO: 55 or a pharmaceutically acceptable salt thereof. In some embodiments, the GLP-1 receptor agonist polypeptide is used for the treatment of a subject with type 1 diabetes wherein the isolated polypeptide is of SEQ ID NO: 115 or a pharmaceutically acceptable salt thereof. In some embodiments, the GLP-1 receptor agonist polypeptide is used for the treatment of a subject with type 1 diabetes wherein the isolated polypeptide is of SEQ ID NO: 120 or a pharmaceutically acceptable salt thereof. In some embodiments, the GLP-1 receptor agonist polypeptide is used for the treatment of a subject with type 1 diabetes wherein the isolated polypeptide is of SEQ ID NO: 132 or a pharmaceutically acceptable salt thereof.

[0986] In some embodiments, the GLP-1 receptor agonist polypeptide is used for the treatment of a subject with type 2 diabetes wherein the isolated polypeptide is of SEQ ID NO: 55 or a pharmaceutically acceptable salt thereof. In some embodiments, the GLP-1 receptor agonist polypeptide is used for the treatment of a subject with type 2 diabetes wherein the isolated polypeptide is of SEQ ID NO: 115 or a pharmaceutically acceptable salt thereof. In some embodiments, the GLP-1 receptor agonist polypeptide is used for the treatment of a subject with type 2 diabetes wherein the isolated polypeptide is of SEQ ID NO: 120 or a pharmaceutically acceptable salt thereof. In some embodiments, the GLP-1 receptor agonist polypeptide is used for the treatment of a subject with type 2 diabetes wherein the isolated polypeptide is of SEQ ID NO: 132 or a pharmaceutically acceptable salt thereof.

[0987] In some embodiments, the GLP-1 receptor agonist polypeptide is used for the treatment of a subject with obesity wherein the isolated polypeptide is of SEQ ID NO: 55 or a pharmaceutically acceptable salt thereof. In some embodiments, the GLP-1 receptor agonist polypeptide is used for the treatment of a subject with obesity wherein the isolated polypeptide is of SEQ ID NO: 115 or a pharmaceutically acceptable salt thereof. In some embodiments, the GLP-1 receptor agonist polypeptide is used for the treatment of a subject with obesity wherein the isolated polypeptide is of SEQ ID NO: 120 or a pharmaceutically acceptable salt thereof. In some embodiments, the GLP-1 receptor agonist polypeptide is used for the treatment of a subject with obesity wherein the isolated polypeptide is of SEQ ID NO: 132 or a pharmaceutically acceptable salt thereof.

[0988] In some embodiments, the GLP-1 receptor agonist polypeptide is used to provide weight loss to a subject wherein the isolated polypeptide is of SEQ ID NO: 55 or a pharmaceutically acceptable salt thereof. In some embodiments, the GLP-1 receptor agonist polypeptide is used to provide weight loss to a subject wherein the isolated polypeptide is of SEQ ID NO: 115 or a pharmaceutically acceptable salt thereof. In some embodiments, the GLP-1 receptor agonist polypeptide is used to provide weight loss to a subject wherein the isolated polypeptide is of SEQ ID NO: 120 or a pharmaceutically acceptable salt thereof. In some embodiments, the GLP-1 receptor agonist polypeptide is used to provide weight loss to a subject wherein the isolated polypeptide is of SEQ ID NO: 132 or a pharmaceutically acceptable salt thereof.

[0989] In some embodiments, the GLP-1 receptor agonist polypeptide is used for the treatment of a subject with NAFLD wherein the isolated polypeptide is of SEQ ID NO: 55 or a pharmaceutically acceptable salt thereof. In some embodiments, the GLP-1 receptor agonist polypeptide is used for the treatment of a subject with NAFLD wherein the isolated polypeptide is of SEQ ID NO: 115 or a pharmaceutically acceptable salt thereof. In some embodiments, the GLP-1 receptor agonist polypeptide is used for the treatment of a subject with NAFLD wherein the isolated polypeptide is of SEQ ID NO: 120 or a pharmaceutically acceptable salt thereof. In some embodiments, the GLP-1 receptor agonist polypeptide is used for the treatment of a subject with NAFLD wherein the isolated polypeptide is of SEQ ID NO: 132 or a pharmaceutically acceptable salt thereof.

[0990] In some embodiments, the GLP-1 receptor agonist polypeptide is used for the treatment of a subject with NASH wherein the isolated polypeptide is of SEQ ID NO: 55 or a pharmaceutically acceptable salt thereof. In some embodiments, the GLP-1 receptor agonist polypeptide is used for the treatment of a subject with NASH wherein the isolated polypeptide is of SEQ ID NO: 115 or a pharmaceutically acceptable salt thereof. In some embodiments, the GLP-1 receptor agonist polypeptide is used for the treatment of a subject with NASH wherein the isolated polypeptide is of SEQ ID NO: 120 or a pharmaceutically acceptable salt thereof. In some embodiments, the GLP-1 receptor agonist polypeptide is used for the treatment of a subject with NASH wherein the isolated polypeptide is of SEQ ID NO: 132 or a pharmaceutically acceptable salt thereof.

[0991] In some embodiments, provided is a method of treating a neurological disease or disorder in a human subject, comprising administering to the subject any of the polypeptides disclosed herein, a pharmaceutical composition comprising any of the disclosed polypeptides, or an osmotic delivery device comprising any of the disclosed polypeptides. In some embodiments, the neurological disease or disorder is selected from the group consisting of Parkinson's disease (PD) and Alzheimer's disease (AD).

[0992] In some embodiments, provided is a method of treating Parkinson's disease in a human subject, comprising administering to the subject any of the polypeptides disclosed herein, a pharmaceutical composition comprising any of the disclosed polypeptides, or an osmotic delivery device comprising any of the disclosed polypeptides. Moderately advanced PD patients that were treated with exenatide for 12 months in a clinical trial demonstrated improvement in motor and cognitive symptoms with the effects persisting for as long as 12 months after termination of the treatment (Aviles-Olmos, I., et al., J Clin Invest, 2013. 123(6): 2730-6; Athauda, D. and Foltynie, T., Drug Discov Today. 2016. 21(5):802-18; Simuni, T. and Brundin, P., J Parkinsons Dis, 2014. 4(3): 345-7).

[0993] In some embodiments, provided is a method of treating Alzheimer's disease in a human subject, comprising administering to the subject any of the polypeptides disclosed herein, a pharmaceutical composition comprising any of the disclosed polypeptides, or an osmotic delivery device comprising any of the disclosed polypeptides. Various AD preclinical studies have shown administration of GLP-1 receptor agonists affords neuroprotective effects with improvements to cognitive functions and positively affects most neuropathological features in AD (Grieco, M. et al., Front Neurosci. 2019; 13: 1112; Holscher, C., Acta Physiologica Sinica, 2014, 66(5): 497-510).

[0994] The terms “patient” or “subject” as used herein, refer to a rodent or an animal, preferably a mammal, and most preferably a human.

### Combinations

[0995] In some embodiments, a GLP-1 receptor agonist polypeptide of the disclosure is co-formulated in combination with a second agent. In some embodiments, a GLP-1 receptor agonist polypeptide of the disclosure is co-formulated in combination with a second agent, wherein the second agent is an incretin mimetic. In some embodiments, a GLP-1 receptor agonist polypeptide of the disclosure is co-formulated in combination with a second agent, wherein the second agent is an insulinotropic compound.

[0996] Some embodiments of the present invention comprise use of a disclosed GLP-1 receptor agonist polypeptide of the present invention in combination with a second therapeutic agent, such as a second polypeptide, such as, by way of, non-limiting example, insulinotropic peptides, peptide hormones, for example, glucagon and incretin mimetics as well as peptide analogs and peptide derivatives thereof, glucagon like polypeptide-2 (GLP-2), PYY (also known as peptide YY, peptide tyrosine tyrosine), as well as peptide analogs and peptide derivatives thereof, for example, PYY(3-36); oxyntomodulin, as well as peptide analogs and peptide derivatives thereof); and gastric inhibitory peptide (GIP), as well as peptide analogs and peptide derivatives thereof. In some embodiments, a pharmaceutical composition comprising an GLP-1 receptor agonist polypeptide in combination with a second agent is used to treat type 2 diabetes.

[0997] In some embodiments, provided is a pharmaceutical composition comprising any of the isolated polypeptides as disclosed herein. In some embodiments, provided is a pharmaceutical composition comprising any of the isolated polypeptides as disclosed herein and further comprising a second polypeptide. In some embodiments, the second polypeptide is a glucagon receptor agonist. In some embodiments, the second polypeptide is a glucagon analog. In some embodiments, the second polypeptide is an amylin analog. In some embodiments, the second polypeptide is a PYY analog.

[0998] GLP-1, including three forms of the peptide, GLP-1(1-37), GLP-1(7-37) and GLP-1(7-36) amide, as well as peptide analogs of GLP-1 have been shown to stimulate insulin secretion (i.e., is insulinotropic), which induces glucose uptake by cells and results in decreases in serum glucose concentrations (see, e g., Mojsov, S., Int. J. Peptide Protein Research, 40:333-343 (1992)).

[0999] Numerous GLP-1 receptor agonists (e.g., GLP-1 peptide derivatives and peptide analogs) demonstrating insulinotropic action are known in the art (see, e.g., U.S. Pat. Nos. 5,118,666; 5,120,712; 5,512,549; 5,545,618; 5,574,008; 5,574,008; 5,614,492; 5,958,909; 6,191,102; 6,268,343; 6,329,336; 6,451,974; 6,458,924; 6,514,500; 6,593,295; 6,703,359; 6,706,689; 6,720,407; 6,821,949; 6,849,708; 6,849,714; 6,887,470; 6,887,849; 6,903,186; 7,022,674; 7,041,646; 7,084,243; 7,101,843; 7,138,486; 7,141,547; 7,144,863; and 7,199,217), as well as in clinical trials (e.g., taspoglutide and albiglutide). One example of a GLP-1 receptor agonist in the practice of the present invention is Victoza® (Novo Nordisk A/S, Bagsvaerd D K) (liraglutide; U.S. Pat. Nos. 6,268,343, 6,458,924, and 7,235,627). Once-daily injectable Victoza® (liraglutide) is commercially available in the United States, Europe, and Japan. Another example, of a GLP-1 receptor agonist is Ozempic® or Rybelsus® (Novo Nordisk A/S, Bagsvaerd D K) (semaglutide, injectable and orally administered formulations, respectively). For ease of reference herein, the family of GLP-1 receptor agonists, GLP-1 peptides, GLP-1 peptide derivatives and GLP-1 peptide analogs having insulinotropic activity is referred to collectively as “GLP-1.”

[1000] Peptide YY (PYY) is a 36 amino acid residue peptide amide. PYY inhibits gut motility and blood flow (Laburthe, M., Trends Endocrinol Metab. 1(3):168-74 (1990), mediates intestinal secretion (Cox, H. M., et al., Br J Pharmacol 101(2):247-52 (1990); Playford, R. J., et al., Lancet 335(8705):1555-7 (1990)), and stimulate net absorption (MacFayden, R. J., et al., Neuropeptides 7(3):219-27 (1986)). Two major in vivo variants, PYY(1-36) and PYY(3-36), have been identified (e.g., Eberlein, G. A., et al., Peptides 10(4), 797-803 (1989)). The sequence of PYY, as well as peptide analogs and peptide derivatives thereof, are known in the art (e.g., U.S. Pat. Nos. 5,574,010 and 5,552,520).

[1001] Oxyntomodulin is a naturally occurring 37 amino acid peptide hormone found in the colon that has been found to suppress appetite and facilitate weight loss (Wynne K, et al., Int J Obes (Lond) 30(12):1729-36(2006)). The sequence of oxyntomodulin, as well as peptide analogs and peptide derivatives thereof, are known in the art (e.g., Bataille D, et al., Peptides 2(Suppl 2):41-44 (1981); and U.S. Patent Publication Nos. 2005/0070469 and 2006/0094652).

[1002] Gastric Inhibitory Peptide (GIP) is an insulinotropic peptide hormone (Efendic, S., et al., Horm Metab Res. 36:742-6 (2004)) and is secreted by the mucosa of the duodenum and jejunum in response to absorbed fat and carbohydrate that stimulate the pancreas to secrete insulin. GIP circulates as a biologically active 42-amino acid peptide. GIP is also known as glucose-dependent insulinotropic protein. GIP is a 42-amino acid gastrointestinal regulatory peptide that stimulates insulin secretion from pancreatic beta cells in the presence of glucose (Tseng, C., et al., PNAS 90:1992-1996 (1993)). The sequence of GIP, as well as peptide analogs and peptide derivatives thereof, are known in the art (e.g., Meier J. J., Diabetes Metab Res Rev. 21(2):91-117 (2005) and Efendic S., Horm Metab Res. 36(11-12):742-6 (2004)).

[1003] Glucagon is a peptide hormone, produced by alpha cells of the pancreas, which raises the concentration of glucose in the bloodstream. Its effect is opposite that of insulin, which lowers the glucose concentration. The pancreas releases glucagon when the concentration of glucose in the bloodstream falls too low. Glucagon causes the liver to convert stored glycogen into glucose, which is released into the bloodstream. High blood glucose levels stimulate the release of insulin. Insulin allows glucose to be taken up and used by insulin-dependent tissues. Thus, glucagon and insulin are part of a feedback system that keeps blood glucose levels at a stable level.

[1004] Human amylin, or islet amyloid polypeptide (IAPP), is a 37-residue polypeptide hormone. Amylin is co-secreted with insulin from pancreatic β-cells in the ratio of approximately 100:1 (insulin:amylin). Pro-islet amyloid polypeptide (i.e., pro-IAPP) is produced in the pancreatic β-cells as a 67 amino acid, 7404 Dalton pro-peptide that undergoes post-translational modifications including protease cleavage to produce the 37-residue amylin. Loss of β-cell function that occurs early in type 1 diabetics and can occur late in type 2 diabetics leads to deficiencies in the secretion of insulin and amylin.

[1005] Amylin functions as part of the endocrine pancreas, those cells within the pancreas that synthesize and secrete hormones. Amylin contributes to glycemic control; it is secreted from the pancreatic islets into the blood circulation and is cleared by peptidases in the kidney. Amylin's metabolic function is well-characterized as an inhibitor of the appearance of nutrients, such as glucose, in the plasma. It thus functions as a synergistic partner to insulin, a peptide that regulates blood glucose levels and coordinates the body's distribution and uptake of glucose. Insulin's role in the body is, among other things, to prevent blood glucose levels from rising too high, particularly after a meal.

[1006] Amylin is believed to play a role in glycemic regulation by slowing gastric emptying and promoting satiety (i.e., feeling of fullness), thereby preventing post-prandial (i.e., after-meal) spikes in blood glucose levels. The overall effect is to slow the rate of appearance of glucose in the blood after eating. Amylin also lowers the secretion of glucagon by the pancreas. Glucagon's role in the body is, among other things, to prevent blood glucose levels dropping too low. This is significant because certain type 1 diabetics, for example, are prone to secrete excess amounts of the blood glucose-raising glucagon just after meals.

[1007] For numerous reasons, human amylin, having a half-life in serum of about 13 minutes, is not amenable for use as a therapeutic agent. Rather, pramlintide (Symlin®, developed by Amylin Pharmaceuticals, Inc., San Diego, CA, USA and marketed by AstraZeneca plc, Cambridge, UK) was developed as a synthetic analogue of human amylin for the treatment of patients with types 1 or 2 diabetes, who use meal-time insulin but cannot achieve desired glycemic control despite optimal insulin therapy. Pramlintide differs from human amylin in 3 of its 37 amino acids. These modifications provide pramlintide a longer half-life of approximately 48 minutes in humans and reduce its propensity to aggregate, a characteristic found of human amylin. Further analogues of human amylin have been disclosed such as those in U.S. patent application Ser. No. 16/598,915 (corresponding to PCT International Application No. PCT/US2019/055696), both filed Oct. 10, 2019.

### Implantable Delivery

[1008] In some embodiments, provided is an osmotic delivery device, as described herein, comprising any of the long acting GLP-1 receptor agonist polypeptides, as disclosed herein, or a pharmaceutical composition comprising any of the long acting GLP-1 receptor agonist polypeptides.

[1009] In some embodiments, the osmotic delivery device comprises an impermeable reservoir comprising interior and exterior surfaces and first and second open ends; a semi-permeable membrane in sealing relationship with the first open end of the reservoir; an osmotic engine within the reservoir and adjacent the semi-permeable membrane; a piston adjacent the osmotic engine, wherein the piston forms a movable seal with the interior surface of the reservoir, the piston divides the reservoir into a first chamber and a second chamber, the first chamber comprising the osmotic engine; a suspension formulation, wherein the second chamber comprises the suspension formulation and the suspension formulation is flowable and comprises the isolated polypeptide; and a diffusion moderator inserted in the second open end of the reservoir, the diffusion moderator adjacent the suspension formulation.

[1010] An implantable, osmotic delivery device typically includes a reservoir having at least one orifice through which the suspension formulation is delivered. The suspension formulation may be stored within the reservoir. In a preferred embodiment, the implantable, drug delivery device is an osmotic delivery device, wherein delivery of the drug is osmotically driven. Some osmotic delivery devices and their component parts have been described, for example, the DUROS® delivery device or similar devices (see, e.g., U.S. Pat. Nos. 5,609,885; 5,728,396; 5,985,305; 5,997,527; 6,113,938; 6,132,420; 6,156,331; 6,217,906; 6,261,584; 6,270,787; 6,287,295; 6,375,978; 6,395,292; 6,508,808; 6,544,252; 6,635,268; 6,682,522; 6,923,800; 6,939,556; 6,976,981; 6,997,922; 7,014,636; 7,207,982; and 7,112,335; 7,163,688; U.S. Patent Publication Nos. 2005/0175701, 2007/0281024, 2008/0091176, and 2009/0202608).

[1011] The osmotic delivery device typically consists of a cylindrical reservoir which contains the osmotic engine, piston, and drug formulation. The reservoir is capped at one end by a controlled-rate, semi-permeable membrane and capped at the other end by a diffusion moderator through which suspension formulation, comprising the drug, is released from the drug reservoir. The piston separates the drug formulation from the osmotic engine and utilizes a seal to prevent the water in the osmotic engine compartment from entering the drug reservoir. The diffusion moderator is designed, in conjunction with the drug formulation, to prevent body fluid from entering the drug reservoir through the orifice.

[1012] The osmotic device releases a drug at a predetermined rate based on the principle of osmosis. Extracellular fluid enters the osmotic delivery device through a semi-permeable membrane directly into a salt engine that expands to drive the piston at a slow and even delivery rate. Movement of the piston forces the drug formulation to be released through the orifice or exit port at a predetermined shear rate. In one embodiment of the present invention, the reservoir of the osmotic device is loaded with a suspension formulation wherein the device is capable of delivering the suspension formulation to a subject over an extended period of time (e.g., about 1, about 3, about 6, about 9, about 10, and about 12 months) at a pre-determined, therapeutically effective delivery rate.

[1013] The release rate of the drug from the osmotic delivery device typically provides a subject with a predetermined target dose of a drug, for example, a therapeutically effective daily dose delivered over the course of a day; that is, the release rate of the drug from the device, provides substantial steady-state delivery of the drug at a therapeutic concentration to the subject.

[1014] Typically, for an osmotic delivery device, the volume of a beneficial agent chamber comprising the beneficial agent formulation is between about 100 μl to about 1000 μl, more preferably between about 120 μl and about 500 μl, more preferably between about 150 μl and about 200 μl.

[1015] Typically, the osmotic delivery device is implanted within the subject, for example, subdermally or subcutaneously to provide subcutaneous drug delivery. The device(s) can be implanted subdermally or subcutaneously into either or both arms (e.g., in the inside, outside, or back of the upper arm) or the abdomen. Preferred locations in the abdominal area are under the abdominal skin in the area extending below the ribs and above the belt line. To provide a number of locations for implantation of one or more osmotic delivery device within the abdomen, the abdominal wall can be divided into 4 quadrants as follows: the upper right quadrant extending at least 2-3 centimeters below the right ribs, e.g., at least about 5-8 centimeters below the right ribs, and at least 2-3 centimeters to the right of the midline, e.g., at least about 5-8 centimeters to the right of the midline; the lower right quadrant extending at least 2-3 centimeters above the belt line, e.g., at least about 5-8 centimeters above the belt line, and at least 2-3 centimeters to the right of the midline, e.g., at least about 5-8 centimeters to the right of the midline; the upper left quadrant extending at least 2-3 centimeters below the left ribs, e.g., at least about 5-8 centimeters below the left ribs, and at least 2-3 centimeters to the left of the midline, e.g., at least about 5-8 centimeters to the left of the midline; and the lower left quadrant extending at least 2-3 centimeters above the belt line, e.g., at least about 5-8 centimeters above the belt line, and at least 2-3 centimeters to the left of the midline, e.g., at least about 5-8 centimeters to the left of the midline. This provides multiple available locations for implantation of one or more devices on one or more occasions. Implantation and removal of osmotic delivery devices are generally carried out by medical professionals using local anesthesia (e.g., lidocaine).

[1016] Termination of treatment by removal of an osmotic delivery device from a subject is straightforward, and provides the important advantage of immediate cessation of delivery of the drug to the subject.

[1017] Preferably, the osmotic delivery device has a fail-safe mechanism to prevent an inadvertent excess or bolus delivery of drug in a theoretical situation like the plugging or clogging of the outlet (diffusion moderator) through which the drug formulation is delivered. To prevent an inadvertent excess or bolus delivery of drug the osmotic delivery device is designed and constructed such that the pressure needed to partially or wholly dislodge or expel the diffusion moderator from the reservoir exceeds the pressure needed to partially or wholly dislodge or expel the semi-permeable membrane to the extent necessary to de-pressurize the reservoir. In such a scenario, pressure would build within the device until it would push the semi-permeable membrane at the other end outward, thereby releasing the osmotic pressure. The osmotic delivery device would then become static and no longer deliver the drug formulation provided that the piston is in a sealing relationship with the reservoir.

[1018] A dose and delivery rate can be selected to achieve a desired blood concentration of a drug generally within less than about 6 half-lives of the drug within the subject after implantation of the device. The blood concentration of the drug is selected to give the optimal therapeutic effects of the drug while avoiding undesirable side effects that may be induced by excess concentration of the drug, while at the same time avoiding peaks and troughs that may induce side effects associated with peak or trough plasma concentrations of the drug.

[1019] The suspension formulations may also be used in infusion pumps, for example, the ALZET® (DURECT Corporation, Cupertino, Calif.) osmotic pumps which are miniature, infusion pumps for the continuous dosing of laboratory animals (e.g., mice and rats).

### Modes of Administration

[1020] In some embodiments, the method comprises providing a GLP-1 receptor agonist polypeptide of the disclosure or a pharmaceutical composition thereof, to a subject in need of treatment, via injection. In some embodiments, the method comprises providing a GLP-1 receptor agonist polypeptide of the disclosure or a pharmaceutical composition thereof, formulated for oral administration, to a subject in need of treatment.

[1021] In some embodiments, the method comprises providing a GLP-1 receptor agonist polypeptide of the disclosure or a pharmaceutical composition thereof, to a subject in need of treatment, via implantation. In some embodiments, the method comprises providing continuous delivery of a GLP-1 receptor agonist polypeptide, to a subject in need of treatment, from an osmotic delivery device. The delivery device, such as an osmotic delivery device, comprises sufficient GLP-1 receptor agonist polypeptide of the disclosure for continuous administration for up to 3 months, 6 months, 9 months, 12 months, 18 months or 24 months. As such, continuous administration of a GLP-1 receptor agonist polypeptide of the disclosure via osmotic delivery device eliminates daily, or multiple daily dosing of marketed GLP-1 receptor agonist polypeptides.

[1022] The substantial steady-state delivery of the GLP-1 receptor agonist polypeptide from the osmotic delivery device is continuous over an administration period. In some embodiments, the subject or patient is a human subject or human patient.

[1023] In some embodiments of the present invention, the administration period is, for example, at least about 3 months, at least about 3 months to about a year, at least about 4 months to about a year, at least about 5 months to about a year, at least about 6 months to about a year, at least about 8 months to about a year, at least about 9 months to about a year, at least about 10 months to about a year, at least about one year to about two years, at least about two years to about three years.

[1024] In further embodiments, the treatment methods of the present invention provide significant decrease in the subject's fasting plasma glucose concentration after implantation of the osmotic delivery device in the subject (relative to the subject's fasting plasma glucose concentration before implantation of the osmotic delivery device) that is achieved within about 7 days, 6 days, 5 days, 4 days, 3 days, 2 days, 1 day or less after implantation of the osmotic delivery device in the subject. The significant decrease in fasting plasma glucose is typically statistically significant as demonstrated by application of an appropriate statistical test or is considered significant for the subject by a medical practitioner. A significant decrease in fasting plasma glucose relative to the baseline before implantation is typically maintained over the administration period.

[1025] In some embodiments, the present invention relates to a method of treating a disease or condition in a subject in need of treatment. The method comprises providing continuous delivery of a drug from an osmotic delivery device, wherein substantial steady-state delivery of the drug at therapeutic concentrations is achieved in the subject. The substantial steady-state delivery of the drug from the osmotic delivery device is continuous over an administration period of at least about 3 months. The drug has a known or determined half-life in a typical subject. Humans are preferred subjects for the practice of the present invention. The present invention includes a drug effective for treatment of the disease or condition, as well as an osmotic delivery device comprising the drug for use in the present methods of treating the disease or condition in a subject in need of treatment. Advantages of the present invention include mitigation of peak-associated drug toxicities and attenuation of sub-optimal drug therapy associated with troughs.

[1026] In some embodiments, the substantial steady-state delivery of a drug at therapeutic concentrations is achieved within a period of about 1 month, 7 days, 5 days, 3 days or 1 day after implantation of the osmotic delivery device in the subject.

[1027] The invention also provides a method for promoting weight loss in a subject in need thereof, a method for treating excess weight or obesity in a subject in need thereof, and/or a method for suppressing appetite in a subject in need thereof. The method comprises providing delivery of an isolated GLP-1 receptor agonist polypeptide. In some embodiments, the isolated GLP-1 receptor agonist polypeptide is continuously delivered from an implantable osmotic delivery device. In some embodiments, substantial steady-state delivery of the GLP-1 receptor agonist polypeptide from the osmotic delivery device is achieved and is substantially continuous over an administration period. In some embodiments, the subject is human.

[1028] The present invention includes an osmotic delivery device comprising a GLP-1 receptor agonist polypeptide for use in the present methods in a subject in need of treatment. The subject may have type 2 diabetes. The subject in need thereof may have a baseline HbA1c % of greater than 10.0%, i.e., a high baseline (HBL) subject. The subject may not have previously received a drug for treating type 2 diabetes mellitus.

[1029] In further embodiments, the treatment methods of the present invention provide significant decrease in the subject's fasting plasma glucose concentration after implantation of the osmotic delivery device in the subject (relative to the subject's fasting plasma glucose concentration before implantation of the osmotic delivery device) that is achieved within about 7 days or less after implantation of the osmotic delivery device in the subject, within about 6 days or less after implantation of the osmotic delivery device in the subject, within about 5 days or less after implantation of the osmotic delivery device in the subject, within about 4 days or less after implantation of the osmotic delivery device in the subject, within about 3 days or less after implantation of the osmotic delivery device in the subject, within about 2 days or less after implantation of the osmotic delivery device in the subject, or within about 1 day or less after implantation of the osmotic delivery device in the subject. In preferred embodiments of the present invention, the significant decrease in the subject's fasting plasma glucose concentration after implantation of the osmotic delivery device, relative to the subject's fasting plasma glucose concentration before implantation, is achieved within about 2 days or less, preferably within about 1 day or less after implantation of the osmotic delivery device in the subject, or more preferably within about 1 day after implantation of the osmotic delivery device in the subject. The significant decrease in fasting plasma glucose is typically statistically significant as demonstrated by application of an appropriate statistical test or is considered significant for the subject by a medical practitioner. A significant decrease in fasting plasma glucose relative to the baseline before implantation is typically maintained over the administration period.

[1030] In embodiments of all aspects of the present invention relating to methods of treating a disease or condition in a subject, an exemplary osmotic delivery device comprises the following: an impermeable reservoir comprising interior and exterior surfaces and first and second open ends; a semi-permeable membrane in sealing relationship with the first open end of the reservoir; an osmotic engine within the reservoir and adjacent the semi-permeable membrane; a piston adjacent the osmotic engine, wherein the piston forms a movable seal with the interior surface of the reservoir, the piston divides the reservoir into a first chamber and a second chamber, the first chamber comprising the osmotic engine; a drug formulation or suspension formulation comprising the drug, wherein the second chamber comprises the drug formulation or suspension formulation and the drug formulation or suspension formulation is flowable; and a diffusion moderator inserted in the second open end of the reservoir, the diffusion moderator adjacent the suspension formulation. In preferred embodiments, the reservoir comprises titanium or a titanium alloy.

[1031] In embodiments of all aspects of the present invention relating to methods of treating a disease or condition in a subject, the drug formulation can comprise the drug and a vehicle formulation. Alternatively, suspension formulations are used in the methods and can, for example, comprise a particle formulation comprising the drug and a vehicle formulation. Vehicle formulations for use in forming the suspension formulations of the present invention can, for example, comprise a solvent and a polymer.

[1032] The reservoir of the osmotic delivery devices may, for example, comprise titanium or a titanium alloy.

[1033] In embodiments of all aspects of the present invention the implanted osmotic delivery device can be used to provide subcutaneous delivery.

[1034] In embodiments of all aspects of the present invention the continuous delivery can, for example, be zero-order, controlled continuous delivery.

### Pharmaceutical Compositions

[1035] According to another embodiment, the invention provides a pharmaceutical composition comprising a compound, i.e., isolated polypeptide, of this invention or a pharmaceutically acceptable derivative thereof and a pharmaceutically acceptable carrier, adjuvant, or vehicle.

[1036] In some embodiments, provided is a pharmaceutical composition comprising any of the disclosed polypeptides formulated as a or pharmaceutically acceptable salts thereof, such as a trifluoroacetate salt, acetate salt or hydrochloride salt. In some embodiments, provided is a pharmaceutical composition comprising any of the disclosed polypeptides formulated as a trifluoroacetate salt. In some embodiments, provided is a pharmaceutical composition comprising any of the disclosed polypeptides formulated as an acetate salt. In some embodiments, provided is a pharmaceutical composition comprising any of the disclosed polypeptides formulated as a hydrochloride salt.

[1037] The term “pharmaceutically acceptable carrier, adjuvant, or vehicle” refers to a non-toxic carrier, adjuvant, or vehicle that does not destroy the pharmacological activity of the compound with which it is formulated.

[1038] As used herein, the term “pharmaceutically acceptable carrier” is intended to include any and all solvents, polymers, dispersion media, coatings, antibacterial and antifungal agents, isotonic and absorption delaying agents, and the like, compatible with pharmaceutical administration. Suitable carriers are described in the most recent edition of Remington's Pharmaceutical Sciences, a standard reference text in the field, which is incorporated herein by reference. Preferred examples of such carriers or diluents include, but are not limited to, water, saline, ringer's solutions, dextrose solution, and 5% human serum albumin. Liposomes and non-aqueous vehicles such as fixed oils may also be used. The use of such media and agents for pharmaceutically active substances is well known in the art. Except insofar as any conventional media or agent is incompatible with the active compound, use thereof in the compositions is contemplated. Supplementary active compounds can also be incorporated into the compositions.

[1039] Representative pharmaceutically acceptable carriers, adjuvants or vehicles that may be used in the compositions of this invention include, but are not limited to, ion exchangers, alumina, aluminum stearate, lecithin, serum proteins, such as human serum albumin, buffer substances such as phosphates, glycine, sorbic acid, potassium sorbate, partial glyceride mixtures of saturated vegetable fatty acids, water, salts or electrolytes, such as protamine sulfate, disodium hydrogen phosphate, potassium hydrogen phosphate, sodium chloride, zinc salts, colloidal silica, magnesium trisilicate, polyvinyl pyrrolidone, cellulose-based substances, polyethylene glycol, sodium carboxymethylcellulose, polyacrylates, waxes, polyethylene-polyoxypropylene-block polymers, polyethylene glycol and wool fat.

[1040] In some embodiments, provided is a pharmaceutical composition comprising a pharmaceutically acceptable derivative of any of the disclosed polypeptides formulated as a or pharmaceutically acceptable salts thereof, such as a trifluoroacetate salt, acetate salt or hydrochloride salt. A “pharmaceutically acceptable derivative” means any non-toxic salt, ester, salt of an ester or other derivative of a compound of this invention that, upon administration to a recipient, is capable of providing, either directly or indirectly, a compound of this invention or an active metabolite or residue thereof.

[1041] The pharmaceutical composition comprises a drug and may be formulated as a “particle formulation” as described in greater detail below. The pharmaceutical composition and/or particle formulation may include stabilizing components (also referred to herein as “excipients”). Examples of stabilizing components include, but are not limited to, carbohydrates, antioxidants, amino acids, buffers, inorganic compounds, and surfactants.

[1042] The amount of compound in compositions of this invention is such that is effective to measurably activate one or more GLP-1 receptors (e.g., human, rat, monkey etc.), in a biological sample or in a patient. In certain embodiments, the amount of compound in compositions of this invention is such that is effective to measurably agonize human GLP-1 receptor in the absence or presence of human serum albumin, in a biological sample or in a patient. In certain embodiments, a composition of this invention is formulated for administration to a patient in need of such composition. In some embodiments, a composition of this invention is formulated for injectable administration to a patient. In some embodiments, a composition of this invention is formulated for administration to a patient via an implantable delivery device such as an osmotic deliver device.

[1043] The isolated polypeptides of the disclosure (also referred to herein as “active compounds”), and derivatives, fragments, analogs and homologs thereof, can be incorporated into pharmaceutical compositions suitable for administration. Such compositions typically comprise the isolated polypeptide, or a pharmaceutically acceptable salt thereof, and a pharmaceutically acceptable carrier.

[1044] A pharmaceutical composition of the invention is formulated to be compatible with its intended route of administration. Examples of routes of administration include parenteral, (e.g., intravenous, intradermal, subdermal, subcutaneous), oral (e.g., inhalation), transdermal (i.e., topical), transmucosal, rectal, or combinations thereof. In some embodiments, a pharmaceutical composition or an isolated polypeptide of the disclosure is formulated for administration by topical administration. In some embodiments, a pharmaceutical composition or an isolated polypeptide of the disclosure is formulated for administration by inhalation administration. In some embodiments, the pharmaceutical composition is formulated for administration by a device or other suitable delivery mechanism that is suitable for subdermal or subcutaneous implantation and delivers the pharmaceutical composition subcutaneously. In some embodiments, the pharmaceutical composition is formulated for administration by an implant device that is suitable for subdermal or subcutaneous implantation and delivers the pharmaceutical composition subcutaneously. In some embodiments, the pharmaceutical composition is formulated for administration by an osmotic delivery device, e.g., an implantable osmotic delivery device, that is suitable for subdermal or subcutaneous placement or other implantation and delivers the pharmaceutical composition subcutaneously. Solutions or suspensions used for parenteral application, intradermal application, subdermal application, subcutaneous application, or combinations thereof can include the following components: a sterile diluent such as water for injection, saline solution, fixed oils, polyethylene glycols, glycerine, propylene glycol or other synthetic solvents; antibacterial agents such as benzyl alcohol or methyl parabens; antioxidants such as ascorbic acid or sodium bisulfite; chelating agents such as ethylenediaminetetraacetic acid (EDTA); buffers such as acetates, citrates or phosphates, and agents for the adjustment of tonicity such as sodium chloride or dextrose. The pH can be adjusted with acids or bases, such as hydrochloric acid or sodium hydroxide. The parenteral preparation can be enclosed in ampoules, disposable syringes or multiple dose vials made of glass or plastic.

[1045] Pharmaceutical compositions suitable for injectable use include sterile aqueous solutions (where water soluble) or dispersions and sterile powders for the extemporaneous preparation of sterile injectable solutions or dispersion. For intravenous administration, suitable carriers include physiological saline, bacteriostatic water, Cremophor EL (BASF, Parsippany, N.J.) or phosphate buffered saline (PBS). In all cases, the composition must be sterile and should be fluid to the extent that easy syringeability exists. It must be stable under the conditions of manufacture and storage and must be preserved against the contaminating action of microorganisms such as bacteria and fungi. The carrier can be a solvent or dispersion medium containing, for example, water, ethanol, polyol (for example, glycerol, propylene glycol, and liquid polyethylene glycol, and the like), and suitable mixtures thereof. The proper fluidity can be maintained, for example, by the use of a coating such as lecithin, by the maintenance of the required particle size in the case of dispersion and by the use of surfactants. Prevention of the action of microorganisms can be achieved by various antibacterial and antifungal agents, for example, parabens, chlorobutanol, phenol, ascorbic acid, thimerosal, and the like. In many cases, it will be preferable to include isotonic agents, for example, sugars, polyalcohols such as manitol, sorbitol, sodium chloride in the composition. Prolonged absorption of the injectable compositions can be brought about by including in the composition an agent which delays absorption, for example, aluminum monostearate and gelatin.

[1046] Sterile injectable solutions can be prepared by incorporating the active compound in the required amount in an appropriate solvent with one or a combination of ingredients enumerated above, as required, followed by filtered sterilization. Generally, dispersions are prepared by incorporating the active compound into a sterile vehicle that contains a basic dispersion medium and the required other ingredients from those enumerated above. In the case of sterile powders for the preparation of sterile injectable solutions, methods of preparation are vacuum drying and freeze-drying that yields a powder of the active ingredient plus any additional desired ingredient from a previously sterile-filtered solution thereof.

[1047] Oral compositions generally include an inert diluent or an edible carrier. They can be enclosed in gelatin capsules or compressed into tablets. For the purpose of oral therapeutic administration, the active compound can be incorporated with excipients and used in the form of tablets, troches, or capsules. Oral compositions can also be prepared using a fluid carrier for use as a mouthwash, wherein the compound in the fluid carrier is applied orally and swished and expectorated or swallowed. Pharmaceutically compatible binding agents, and/or adjuvant materials can be included as part of the composition. The tablets, pills, capsules, troches and the like can contain any of the following ingredients, or compounds of a similar nature: a binder such as microcrystalline cellulose, gum tragacanth or gelatin; an excipient such as starch or lactose, a disintegrating agent such as alginic acid, Primogel, or corn starch; a lubricant such as magnesium stearate or Sterotes; a glidant such as colloidal silicon dioxide; a sweetening agent such as sucrose or saccharin; or a flavoring agent such as peppermint, methyl salicylate, or orange flavoring.

[1048] For administration by inhalation, the compounds are delivered in the form of an aerosol spray from pressured container or dispenser which contains a suitable propellant, e.g., a gas such as carbon dioxide, or a nebulizer.

[1049] Systemic administration can also be by transmucosal or transdermal means. For transmucosal or transdermal administration, penetrants appropriate to the barrier to be permeated are used in the formulation. Such penetrants are generally known in the art, and include, for example, for transmucosal administration, detergents, bile salts, and fusidic acid derivatives. Transmucosal administration can be accomplished through the use of nasal sprays or suppositories. For transdermal administration, the active compounds are formulated into ointments, salves, gels, or creams as generally known in the art.

[1050] In one embodiment, the active compounds are prepared with carriers that will protect the compound against rapid elimination from the body, such as a controlled release formulation, including implants and microencapsulated delivery systems. Biodegradable, biocompatible polymers can be used, such as ethylene vinyl acetate, polyanhydrides, polyglycolic acid, collagen, polyorthoesters, and polylactic acid. Methods for preparation of such formulations will be apparent to those skilled in the art. The materials can also be obtained commercially from Alza Corporation and Nova Pharmaceuticals, Inc. Liposomal suspensions can also be used as pharmaceutically acceptable carriers. These can be prepared according to methods known to those skilled in the art, for example, as described in U.S. Pat. No. 4,522,811.

[1051] It is especially advantageous to formulate oral or parenteral compositions in dosage unit form for ease of administration and uniformity of dosage. Dosage unit form as used herein refers to physically discrete units suited as unitary dosages for the subject to be treated; each unit containing a predetermined quantity of active compound calculated to produce the desired therapeutic effect in association with the required pharmaceutical carrier. The specification for the dosage unit forms of the invention are dictated by and directly dependent on the unique characteristics of the active compound and the particular therapeutic effect to be achieved, and the limitations inherent in the art of compounding such an active compound for the treatment of individuals.

[1052] The pharmaceutical compositions can be included in a container, pack, or dispenser together with instructions for administration.

### Drug Particle Formulations

[1053] Compounds, i.e., isolated polypeptides or pharmaceutically acceptable salts thereof, for use in the practice of the present invention are typically added to particle formulations, which are used to make polypeptide-containing particles that are uniformly suspended, dissolved or dispersed in a suspension vehicle to form a suspension formulation. In some embodiments, the GLP-1 receptor agonist polypeptide is formulated in a particle formulation and converted (e.g., spray dried) to particles. In some embodiments, the particles comprising the GLP-1 receptor agonist polypeptide are suspended in a vehicle formulation, resulting in a suspension formulation of vehicle and suspended particles comprising the GLP-1 receptor agonist polypeptide.

[1054] Preferably, particle formulations are formable into particles using processes such as spray drying, lyophilization, desiccation, freeze-drying, milling, granulation, ultrasonic drop creation, crystallization, precipitation, or other techniques available in the art for forming particles from a mixture of components. In one embodiment of the invention the particles are spray dried. The particles are preferably substantially uniform in shape and size.

[1055] In some embodiments, the present invention provides drug particle formulations for pharmaceutical use. The particle formulation typically comprises a drug and includes one or more stabilizing component (also referred to herein as “excipients”). Examples of stabilizing components include, but are not limited to, carbohydrates, antioxidants, amino acids, buffers, inorganic compounds, and surfactants. The amounts of stabilizers in the particle formulation can be determined experimentally based on the activities of the stabilizers and the desired characteristics of the formulation, in view of the teachings of the present specification.

[1056] In any of the embodiments, the particle formulation may comprise about 50 wt % to about 90 wt % drug, about 50 wt % to about 85 wt % drug, about 55 wt % to about 90 wt % drug, about 60 wt % to about 90 wt % drug, about 65 wt % to about 85 wt % drug, about 65 wt % to about 90 wt % drug, about 70 wt % to about 90 wt % drug, about 70 wt % to about 85 wt % drug, about 70 wt % to about 80 wt % drug, or about 70 wt % to about 75 wt % drug.

[1057] Typically, the amount of carbohydrate in the particle formulation is determined by aggregation concerns. In general, the carbohydrate amount should not be too high so as to avoid promoting crystal growth in the presence of water due to excess carbohydrate unbound to drug.

[1058] Typically, the amount of antioxidant in the particle formulation is determined by oxidation concerns, while the amount of amino acid in the formulation is determined by oxidation concerns and/or formability of particles during spray drying.

[1059] Typically, the amount of buffer in the particle formulation is determined by pre-processing concerns, stability concerns, and formability of particles during spray drying. Buffer may be required to stabilize drug during processing, e.g., solution preparation and spray drying, when all stabilizers are solubilized.

[1060] Examples of carbohydrates that may be included in the particle formulation include, but are not limited to, monosaccharides (e.g., fructose, maltose, galactose, glucose, D-mannose, and sorbose), disaccharides (e.g., lactose, sucrose, trehalose, and cellobiose), polysaccharides (e.g., raffinose, melezitose, maltodextrins, dextrans, and starches), and alditols (acyclic polyols; e.g., mannitol, xylitol, maltitol, lactitol, xylitol sorbitol, pyranosyl sorbitol, and myoinsitol). Suitable carbohydrates include disaccharides and/or non-reducing sugars, such as sucrose, trehalose, and raffinose.

[1061] Examples of antioxidants that may be included in the particle formulation include, but are not limited to, methionine, ascorbic acid, sodium thiosulfate, catalase, platinum, ethylenediaminetetraacetic acid (EDTA), citric acid, cysteine, thioglycerol, thioglycolic acid, thiosorbitol, butylated hydroxanisol, butylated hydroxyltoluene, and propyl gallate. Further, amino acids that readily oxidize can be used as antioxidants, for example, cysteine, methionine, and tryptophan.

[1062] Examples of amino acids that may be included in the particle formulation include, but are not limited to, arginine, methionine, glycine, histidine, alanine, leucine, glutamic acid, iso-leucine, L-threonine, 2-phenylamine, valine, norvaline, proline, phenylalanine, tryptophan, serine, asparagines, cysteine, tyrosine, lysine, and norleucine. Suitable amino acids include those that readily oxidize, e.g., cysteine, methionine, and tryptophan.

[1063] Examples of buffers that may be included in the particle formulation include, but are not limited to, citrate, histidine, succinate, phosphate, maleate, tris, acetate, carbohydrate, and gly-gly. Suitable buffers include citrate, histidine, succinate, and tris.

[1064] Examples of inorganic compounds that may be included in the particle formulation include, but are not limited to, NaCl, Na₂SO₄, NaHCO₃, KCl, KH₂PO₄, CaCl₂), and MgCl₂.

[1065] In addition, the particle formulation may include other stabilizers/excipients, such as surfactants and salts. Examples of surfactants include, but are not limited to, Polysorbate 20, Polysorbate 80, PLURONIC® (BASF Corporation, Mount Olive, N.J.) F68, and sodium dodecyl sulfate (SDS). Examples of salts include, but are not limited to, sodium chloride, calcium chloride, and magnesium chloride.

[1066] The particles are typically sized such that they can be delivered via an implantable osmotic delivery device. Uniform shape and size of the particles typically helps to provide a consistent and uniform rate of release from such a delivery device; however, a particle preparation having a non-normal particle size distribution profile may also be used. For example, in a typical implantable osmotic delivery device having a delivery orifice, the size of the particles is less than about 30%, more preferably is less than about 20%, more preferably is less than about than 10%, of the diameter of the delivery orifice. In an embodiment of the particle formulation for use with an osmotic delivery system, wherein the delivery orifice diameter of the implant is about 0.5 mm, particle sizes may be, for example, less than about 150 microns to about 50 microns. In an embodiment of the particle formulation for use with an osmotic delivery system, wherein the delivery orifice diameter of the implant is about 0.1 mm, particle sizes may be, for example, less than about 30 microns to about 10 microns. In one embodiment, the orifice is about 0.25 mm (250 microns) and the particle size is about 2 microns to about 5 microns.

[1067] Those of ordinary skill in the art will appreciate that a population of particles follow principles of particle size distribution. Widely used, art-recognized methods of describing particle size distributions include, for example, average diameters and D values, such as the D50 value, which is commonly used to represent the mean diameter of the range of the particle sizes of a given sample.

[1068] Particles of a particle formulation have diameters of between about 2 microns to about 150 micron, e.g., less than 150 microns in diameter, less than 100 microns in diameter, less than 50 microns in diameter, less than 30 microns in diameter, less than 10 microns in diameter, less than 5 microns in diameter, and about 2 microns in diameter. Preferably, particles have diameters of between about 2 microns and about 50 microns.

[1069] Particles of a particle formulation comprising an isolated GLP-1 receptor agonist polypeptide have average diameters of between about 0.3 microns to about 150 microns. Particles of a particle formulation comprising an isolated GLP-1 receptor agonist polypeptide have average diameters of between about 2 microns to about 150 microns, e.g., less than 150 microns in average diameter, less than 100 microns in average diameter, less than 50 microns in average diameter, less than 30 microns in average diameter, less than 10 microns in average diameter, less than 5 microns in average diameter, and about 2 microns in average diameter. In some embodiments, particles have average diameters of between about 0.3 microns and 50 microns, for example, between about 2 microns and about 50 microns. In some embodiments, the particles have an average diameter between 0.3 microns and 50 microns, for example, between about 2 microns and about 50 microns, where each particle is less than about 50 microns in diameter.

[1070] Typically, the particles of the particle formulations, when incorporated in a suspension vehicle, do not settle in less than about 3 months, preferably do not settle in less than about 6 months, more preferably do not settle in less than about 12 months, more preferably do not settle in less than about 24 months at delivery temperature, and most preferably do not settle in less than about 36 months at delivery temperature. The suspension vehicles typically have a viscosity of between about 5,000 to about 30,000 poise, preferably between about 8,000 to about 25,000 poise, more preferably between about 10,000 to about 20,000 poise. In one embodiment, the suspension vehicle has a viscosity of about 15,000 poise, plus or minus about 3,000 poise. Generally speaking, smaller particles tend to have a lower settling rate in viscous suspension vehicles than larger particles. Accordingly, micron- to nano-sized particles are typically desirable. In viscous suspension formulation, particles of about 2 microns to about 7 microns of the present invention will not settle for at least 20 years at room temperature based on simulation modeling studies. In an embodiment of the particle formulation of the present invention, for use in an implantable osmotic delivery device, comprises particles of sizes less than about 50 microns, more preferably less than about 10 microns, more preferably in a range from about 2 microns to about 7 microns.

[1071] In summary, disclosed polypeptides, or pharmaceutically acceptable salts thereof, are formulated into dried powders in solid state particles, which preserve maximum chemical and biological stability of the drug. Particles offers long-term storage stability at high temperature, and therefore, allows delivery to a subject of stable and biologically effective drug for extended periods of time. Particles are suspended in suspension vehicles for administration to patients.

### Particle Suspensions in Vehicles

[1072] In one aspect, the suspension vehicle provides a stable environment in which the drug particle formulation is dispersed. The drug particle formulations are chemically and physically stable (as described above) in the suspension vehicle. The suspension vehicle typically comprises one or more polymer and one or more solvent that form a solution of sufficient viscosity to uniformly suspend the particles comprising the drug. The suspension vehicle may comprise further components, including, but not limited to, surfactants, antioxidants, and/or other compounds soluble in the vehicle.

[1073] The viscosity of the suspension vehicle is typically sufficient to prevent the drug particle formulation from settling during storage and use in a method of delivery, for example, in an implantable, osmotic delivery device. The suspension vehicle is biodegradable in that the suspension vehicle disintegrates or breaks down over a period of time in response to a biological environment, while the drug particle is dissolved in the biological environment and the active pharmaceutical ingredient (i.e., the drug) in the particle is absorbed.

[1074] In embodiments, the suspension vehicle is a “single-phase” suspension vehicle, which is a solid, semisolid, or liquid homogeneous system that is physically and chemically uniform throughout.

[1075] The solvent in which the polymer is dissolved may affect characteristics of the suspension formulation, such as the behavior of drug particle formulation during storage. A solvent may be selected in combination with a polymer so that the resulting suspension vehicle exhibits phase separation upon contact with the aqueous environment. In some embodiments of the invention, the solvent may be selected in combination with the polymer so that the resulting suspension vehicle exhibits phase separation upon contact with the aqueous environment having less than approximately about 10% water.

[1076] The solvent may be an acceptable solvent that is not miscible with water. The solvent may also be selected so that the polymer is soluble in the solvent at high concentrations, such as at a polymer concentration of greater than about 30%. Examples of solvents useful in the practice of the present invention include, but are not limited to, lauryl alcohol, benzyl benzoate, benzyl alcohol, lauryl lactate, decanol (also called decyl alcohol), ethyl hexyl lactate, and long chain (C8 to C24) aliphatic alcohols, esters, or mixtures thereof. The solvent used in the suspension vehicle may be “dry,” in that it has a low moisture content. Preferred solvents for use in formulation of the suspension vehicle include lauryl lactate, lauryl alcohol, benzyl benzoate, and mixtures thereof.

[1077] Examples of polymers for formulation of the suspension vehicles of the present invention include, but are not limited to, a polyester (e.g., polylactic acid and polylacticpolyglycolic acid), a polymer comprising pyrrolidones (e.g., polyvinylpyrrolidone having a molecular weight ranging from approximately 2,000 to approximately 1,000,000), ester or ether of an unsaturated alcohol (e.g., vinyl acetate), polyoxyethylenepolyoxypropylene block copolymer, or mixtures thereof. Polyvinylpyrrolidone can be characterized by its K-value (e.g., K-17), which is a viscosity index. In one embodiment, the polymer is polyvinylpyrrolidone having a molecular weight of 2,000 to 1,000,000. In a preferred embodiment, the polymer is polyvinylpyrrolidone K-17 (typically having an approximate average molecular weight range of 7,900-10,800). The polymer used in the suspension vehicle may include one or more different polymers or may include different grades of a single polymer. The polymer used in the suspension vehicle may also be dry or have a low moisture content.

[1078] Generally speaking, a suspension vehicle for use in the present invention may vary in composition based on the desired performance characteristics. In one embodiment, the suspension vehicle may comprise about 40 wt % to about 80 wt % polymer(s) and about 20 wt % to about 60 wt % solvent(s). Preferred embodiments of a suspension vehicle include vehicles formed of polymer(s) and solvent(s) combined at the following ratios: about 25 wt % solvent and about 75 wt % polymer; about 50 wt % solvent and about 50 wt % polymer; about 75 wt % solvent and about 25 wt % polymer. Accordingly, in some embodiments, the suspension vehicle may comprise selected components and in other embodiments consist essentially of selected components.

[1079] The suspension vehicle may exhibit Newtonian behavior. The suspension vehicle is typically formulated to provide a viscosity that maintains a uniform dispersion of the particle formulation for a predetermined period of time. This helps facilitate making a suspension formulation tailored to provide controlled delivery of the drug contained in the drug particle formulation. The viscosity of the suspension vehicle may vary depending on the desired application, the size and type of the particle formulation, and the loading of the particle formulation in the suspension vehicle. The viscosity of the suspension vehicle may be varied by altering the type or relative amount of the solvent or polymer used.

[1080] The suspension vehicle may have a viscosity ranging from about 100 poise to about 1,000,000 poise, preferably from about 1,000 poise to about 100,000 poise. In preferred embodiments, the suspension vehicles typically have a viscosity, at 33° C., of between about 5,000 to about 30,000 poise, preferably between about 8,000 to about 25,000 poise, more preferably between about 10,000 to about 20,000 poise. In one embodiment, the suspension vehicle has a viscosity of about 15,000 poise, plus or minus about 3,000 poise, at 33° C. The viscosity may be measured at 33° C., at a shear rate of 10-4/see, using a parallel plate rheometer.

[1081] The suspension vehicle may exhibit phase separation when contacted with the aqueous environment; however, typically the suspension vehicle exhibits substantially no phase separation as a function of temperature. For example, at a temperature ranging from approximately 0° C. to approximately 70° C. and upon temperature cycling, such as cycling from 4° C. to 37° C. to 4° C., the suspension vehicle typically exhibits no phase separation.

[1082] The suspension vehicle may be prepared by combining the polymer and the solvent under dry conditions, such as in a dry box. The polymer and solvent may be combined at an elevated temperature, such as from approximately 40° C. to approximately 70° C., and allowed to liquefy and form the single phase. The ingredients may be blended under vacuum to remove air bubbles produced from the dry ingredients. The ingredients may be combined using a conventional mixer, such as a dual helix blade or similar mixer, set at a speed of approximately 40 rpm. However, higher speeds may also be used to mix the ingredients. Once a liquid solution of the ingredients is achieved, the suspension vehicle may be cooled to room temperature. Differential scanning calorimetry (DSC) may be used to verify that the suspension vehicle is a single phase. Further, the components of the vehicle (e.g., the solvent and/or the polymer) may be treated to substantially reduce or substantially remove peroxides (e.g., by treatment with methionine; see, e.g., U.S., Patent Application Publication No. 2007-0027105).

[1083] The drug particle formulation is added to the suspension vehicle to form a suspension formulation. In some embodiments, the suspension formulation may comprise a drug particle formulation and a suspension vehicle and in other embodiments consist essentially of a drug particle formulation and a suspension vehicle.

[1084] The suspension formulation may be prepared by dispersing the particle formulation in the suspension vehicle. The suspension vehicle may be heated and the particle formulation added to the suspension vehicle under dry conditions. The ingredients may be mixed under vacuum at an elevated temperature, such as from about 40° C. to about 70° C. The ingredients may be mixed at a sufficient speed, such as from about 40 rpm to about 120 rpm, and for a sufficient amount of time, such as about 15 minutes, to achieve a uniform dispersion of the particle formulation in the suspension vehicle. The mixer may be a dual helix blade or other suitable mixer. The resulting mixture may be removed from the mixer, sealed in a dry container to prevent water from contaminating the suspension formulation, and allowed to cool to room temperature before further use, for example, loading into an implantable, drug delivery device, unit dose container, or multiple-dose container.

[1085] The suspension formulation typically has an overall moisture content of less than about 10 wt %, preferably less than about 5 wt %, and more preferably less than about 4 wt %.

[1086] In preferred embodiments, the suspension formulations of the present invention are substantially homogeneous and flowable to provide delivery of the drug particle formulation from the osmotic delivery device to the subject.

[1087] In summary, the components of the suspension vehicle provide biocompatibility. Components of the suspension vehicle offer suitable chemico-physical properties to form stable suspensions of drug particle formulations. These properties include, but are not limited to, the following: viscosity of the suspension; purity of the vehicle; residual moisture of the vehicle; density of the vehicle; compatibility with the dry powders; compatibility with implantable devices; molecular weight of the polymer; stability of the vehicle; and hydrophobicity and hydrophilicity of the vehicle. These properties can be manipulated and controlled, for example, by variation of the vehicle composition and manipulation of the ratio of components used in the suspension vehicle.

[1088] The suspension formulations described herein may be used in an implantable, osmotic delivery device to provide zero-order, continuous, controlled, and sustained delivery of a compound over an extended period of time, such as over weeks, months, or up to about one year or more. Such an implantable osmotic delivery device is typically capable of delivering the suspension formulation, comprising the drug, at a desired flow rate over a desired period of time. The suspension formulation may be loaded into the implantable, osmotic delivery device by conventional techniques.

### EXAMPLES

[1089] The following examples are put forth so as to provide those of ordinary skill in the art with a complete disclosure and description of how to practice the present invention, and are not intended to limit the scope of what the inventors regard as the invention. Efforts have been made to ensure accuracy with respect to numbers used (e.g., amounts, concentrations, and percent changes) but some experimental errors and deviations should be accounted for. Unless indicated otherwise, temperature is in degrees Centigrade and pressure is at or near atmospheric.

### Example 1: Generation of a Long Acting GLP-1 Receptor Agonist Polypeptides

[1090] Long acting GLP-1 receptor agonist polypeptides of the invention, as provided in Table 4, were synthesized on a Prelude peptide synthesizer (Protein Technologies Inc., Tucson, AZ)) by solid-phase methods using Fmoc strategy with N-[(dimethylamino)-1H-1,2,3-triazolo-[4,5-b]pyridin-1-ylmethylene]-N-methylmethanaminium hexafluorophosphate N-oxide (HATU) or 2-(6-chloro-1-H-benzotriazole-1-yl)-1,1,3,3-tetramethylaminium hexafluorophosphate (HCTU) activation (5-fold molar excess to amino acid) in N,N-dimethylformamide (DMF), and N′N-diisopropylethylamine (DIEA) was used as base. A 20% piperidine/DMF solution was used for Fmoc deprotection. The resin used was Rink Amide MBHA LL (Novabiochem) with loading of (0.30-0.40) mmol/g on a (20-400) pmol scale.

[1091] Upon completion of solid phase synthesis of the linear polypeptide, the resin was washed with dichloromethane (DCM) and dried under vacuum for 30 minutes. For analogs containing the allyloxycarbonyl (Alloc) protecting group, removal was accomplished via a solution of Pd(PPh₃)₃ in (chloroform/acetic acid/n-methyl-morpholine, 37:2:1). For analogs containing the tert-butyloxycarbonyl (BOC)-Lys-fluorenylmethyloxycarbonyl (Fmoc)-OH, the Fmoc protecting group was removed using 20% piperidine/DMF. The resulting Fmoc-deprotected resin was washed with DMF (6×30 secs). Next, elongation of the spacer region was carried out in step-wise manner with the manual addition of each building block under pre-activation conditions. Addition of the lipophilic substituent (also referred to as “acyl chain”) was carried out under solid-phase peptide synthesis (SPPS) conditions with no pre-activation step. Final deprotection and cleavage of the peptide from the solid support were performed by treatment of the resin with (95% TFA, 2% water, 2% thioanisole, and 1% triisopropylsilane) for 2-3 hours. The cleaved peptide was precipitated using cold diethyl ether. The diethyl ether layer was decanted, and the solids triturated again with cold diethyl ether and pelleted by centrifugation.

[1092] For analogs containing a lactam bridge, the appropriate allyl-protected amino acid building blocks were installed under normal solid-phase conditions as described above. Also, Fmoc-Lys-ε-1-(4,4-dimethyl-2,6-dioxocyclohex-1-ylidene)-3-methylbutyl(ivDde)-OH was installed as a handle to later incorporate the acyl spacer and side-chain. Upon completion of the linear peptide the allyl-protecting groups were removed as described above. Lactam-bridge formation was afforded via solid-phase protocol using benzotriazol-1-yl-oxytripyrrolidinophosphonium hexafluorophosphate (PyBOP, 0.5M) activation and DIEA as the base. Deprotection of the Fmoc & ivDde groups was afforded via 4% solution of hydrazine in DMF. The resulting de-protected resin was washed with DMF (6×30 secs). Elongation of the spacer region and addition of a lipophilic substituent was carried out as described in the preceding paragraphs. Final deprotection and cleavage of the peptide from the solid support was performed by treatment of the resin with (95% TFA, 2% water, 2% thioanisole, and 1% triisopropylsilane) for 2-3 hours. The cleaved peptide was precipitated using cold diethyl ether. The diethyl ether was decanted, and the solids triturated again with cold diethyl ether and pelleted by centrifugation.

[1093] The crude product was next dissolved in a solution of acetonitrile (ACN)/H₂O, 0.1% TFA. A 10% solution of acetic acid was added to each solution of crude peptide product and allowed to stir until analysis via LC/MS indicated removal of any CO₂ adducts. The solution was frozen and lyophilized. Purification was afforded via the methods described in Example 2.

### Example 2: Purification and Characterization of Long Acting GLP-1 Receptor Agonist Polypeptides, i.e., Linear Polypeptide, without any Lipophilic Substituent and Optional Spacer

[1094] The product of Example 1 was lyophilized and analyzed by electrospray ionization-liquid chromatography/mass spectrometry (ESI-LC/MS) and analytical high-pressure liquid chromatography (HPLC) and was demonstrated to be pure (>98%). Mass results were consistent with calculated values.

[1095] Characterizations of peptide analogs were performed via C18 HPLC and LC/MS analysis (Acquity SQD Waters Corp, Milford, MA) and UV detection provided by dual absorbance signals at 215 nm and 280 nm, using one of Method A, Method B, Method C or Method D.

[1096] Method A, LC/MS conditions: performed using a Phenomenex HPLC Aeris™ Peptide XB C18 35 column, 1.7 pm, 2.1×100 mm or Acquity BEH300 or BEH130 CT8 column, 1.77 pm. 2.1×100 mm using 5-65% acetonitrile/water with 0.05% TFA over 30 minutes with a flow rate 0.5 mL/min, λ—215 nm, 280 nm.

[1097] Method B, C18 HPLC conditions: HPLC analysis was conducted on an Acquity BEH130, C18 column, 1.7 μm, 100×2.10 mm column at 25° C., 5-65% acetonitrile/water with 0.05% TFA over 30 minutes, flow rate 0.5 mL/min, λ—215 nm, 280 nm.

[1098] Method C, HPLC conditions: HPLC analysis was conducted on an Acquity BEH130, C18 column, 1.7 μm, 100×2.10 mm column at 25° C., 5-65% acetonitrile/water with 0.05% TFA over 20 minutes, flow rate 0.5 mL/min, λ—215 nm, 280 nm.

[1099] Method D, HPLC conditions: HPLC analysis was conducted on an Acquity BEH130, C18 column, 1.7 μm, 100×2.10 mm column at 25° C., 5-65% acetonitrile/water with 0.05% TFA over 10 minutes, flow rate 0.5 mL/min, λ—215 nm, 280 nm. 5.0 μL of sample was injected using a PLNO (partial loop w/needle over-fill) injection mode.

[1100] Table 10 provides exemplary long acting GLP-1 receptor agonist polypeptides of the disclosure.

[1101] Polypeptide analogs without a lipophilic substituent and optional spacer are sometimes referred to herein as “linear polypeptides.” Polypeptide analogs having at least one covalently bound lipophilic substituent and optional spacer are sometimes referred to herein as “conjugated polypeptides.”

TABLE 10
Exemplary compounds: GLP-1 receptor agonist polypeptides

| Com- | | | | Calculated | Observed |
|---|---|---|---|---|---|
| pound | SEQ ID | Molecular | Parent | Mass | Mass |
| No. | NO: | Formula | MW | (M + 3/3) | (M + 3/3) |
| A1 | SEQ ID | C₂₂₀H₃₄₆N₅₄O₇₂ | 4899.49 | 1634.16 | 1635.8 |
| | NO: 1 | | | | |
| A2 | SEQ ID | C₂₂₀H₃₄₈N₅₄O₇₀S | 4901.57 | 1634.86 | 1636.9 |
| | NO: 2 | | | | |
| A3 | SEQ ID | C₂₂₂H₃₅₀N₅₄O₇₂S | 4959.61 | 1654.2 | 1655.6 |
| | NO: 3 | | | | |
| A4 | SEQ ID | C₂₁₉H₃₄₃N₅₁O₇₂S | 4874.5 | 1625.83 | 1626.8 |
| | NO: 4 | | | | |
| A5 | SEQ ID | C₂₁₉H₃₄₄N₅₄O₇₂S | 4917.53 | 1640.18 | 1641.1 |
| | NO: 5 | | | | |
| A6 | SEQ ID | C₂₂₀H₃₄₈N₅₄O₇₀S | 4901.57 | 1634.86 | 1637 |
| | NO: 6 | | | | |
| A7 | SEQ ID | C₂₁₅H₃₃₇N₅₃O₆₇S | 4768.43 | 1591 | 1591 |
| | NO: 7 | | | | |
| A8 | SEQ ID | C₂₁₃H₃₃₃N₅₃O₆₇S | 4740.37 | 1582.3 | 1582.3 |
| | NO: 8 | | | | |
| A9 | SEQ ID | C₂₂₁H₃₄₈N₅₄O₇₀S | 4913.58 | 1641 | 1641 |
| | NO: 9 | | | | |
| A10 | SEQ ID | C₂₁₉H₃₄₄N₅₄O₇₀S | 4885.53 | 1630.9 | 1630.9 |
| | NO: 10 | | | | |
| A11 | SEQ ID | C₂₂₂H₃₅₂N₅₄O₇₀S | 4929.63 | 1646.2 | 1646.2 |
| | NO: 11 | | | | |
| A12 | SEQ ID | C₂₂₀H₃₄₈N₅₄O₇₀S | 4901.57 | 1635.8 | 1635.8 |
| | NO: 12 | | | | |
| A13 | SEQ ID | C₂₁₆H₃₃₉N₅₃O₆₇ | 4750.39 | 1584.46 | 1586.1 |
| | NO: 13 | | | | |
| A14 | SEQ ID | C₂₁₉H₃₃₆N₅₂O₆₈ | 4785.39 | 1596.13 | 1596.4 |
| | NO: 14 | | | | |
| A15 | SEQ ID | C₂₁₉H₃₃₇N₅₃O₆₈ | 4800.41 | 1601.14 | 1602.3 |
| | NO: 15 | | | | |
| A16 | SEQ ID | C₂₁₅H₃₃₆N₅₄O₆₈ | 4765.36 | 1589.45 | 1590.9 |
| | NO: 16 | | | | |
| A17 | SEQ ID | C₂₁₉H₃₃₈N₅₂O₆₇S | 4803.47 | 1602.16 | 1603.1 |
| | NO: 17 | | | | |
| A18 | SEQ ID | C₂₁₅H₃₃₆N₅₂O₆₈S | 4769.41 | 1590.8 | 1592.5 |
| | NO: 18 | | | | |
| A19 | SEQ ID | C₂₁₆H₃₄N₅₃O₆₆S | 4768.47 | 1590.49 | 1592.5 |
| | NO: 19 | | | | |
| A20 | SEQ ID | C₂₁₃H₃₃₄N₅₂O₆₇S | 4727.37 | 1576.79 | 1578 |
| | NO: 20 | | | | |
| A21 | SEQ ID | C₂₂₂H₃₅₀N₅₄O₇₀S | 4927.61 | 1643.54 | 1644.5 |
| | NO: 21 | | | | |
| A22 | SEQ ID | C₂₂₃H₃₅₂N₅₄O₇₀S | 4941.64 | 1648.21 | 1649.2 |
| | NO: 22 | | | | |
| A23 | SEQ ID | C₂₂₃H₃₅₂N₅₄O₇₀S | 4941.64 | 1648.21 | 1649.2 |
| | NO: 23 | | | | |
| A24 | SEQ ID | C₂₂₄H₃₅₁N₅₅O₇₃S | 5014.64 | 1672.55 | 1679.2 |
| | NO: 24 | | | | |
| A25 | SEQ ID | C₂₂₄H₃₅₁N₅₅O₇₃S | 5014.64 | 1672.55 | 1674.3 |
| | NO: 25 | | | | |
| A26 | SEQ ID | C₂₂₅H₃₅₅N₅₅O₇₃S | 5030.69 | 1677.9 | 1673.6 |
| | NO: 26 | | | | |
| A27 | SEQ ID | C₂₂₃H₃₄₆N₅₄O₆₉ | 4887.53 | 1630.18 | 1631.8 |
| | NO: 27 | | | | |
| A28 | SEQ ID | C₂₂₃H₃₄₆N₅₄O₇₀ | 4903.53 | 1635.51 | 1637.2 |
| | NO: 28 | | | | |
| A29 | SEQ ID | C₂₂₆H₃₅₃N₅₅O₆₉ | 4944.63 | 1649.21 | 1650.3 |
| | NO: 29 | | | | |
| A30 | SEQ ID | C₂₂₅H₃₄₉N₅₅O₇₀ | 4944.58 | 1649.19 | 1650.1 |
| | NO: 30 | | | | |
| A31 | SEQ ID | C₂₂₉H₃₅₀N₅₄O₇₀ | 4979.63 | 1660.88 | 1662.4 |
| | NO: 31 | | | | |
| A32 | SEQ ID | C₂₂₄H₃₄₈N₅₄O₆₉ | 4901.56 | 1634.85 | 1635.9 |
| | NO: 32 | | | | |
| A33 | SEQ ID | C₂₂₆H₃₅₅N₅₅O₇₃S | 5042.7 | 1681.9 | 1683.4 |
| | NO: 33 | | | | |
| A34 | SEQ ID | C₂₃₀H₃₆₂N₅₆O₇₆S | 5159.8 | 1720.93 | 1722.1 |
| | NO: 34 | | | | |
| A35 | SEQ ID | C₂₃₂H₃₆₆N₅₆O₇₆S | 5187.86 | 1730.29 | 1731.8 |
| | NO: 35 | | | | |
| A36 | SEQ ID | C₂₃₀H₃₆₂N₅₆O₇₆S | 5159.8 | 1720.93 | 1722.1 |
| | NO: 36 | | | | |
| A37 | SEQ ID | C₂₃₂H₃₆₆N₅₆O₇₆S | 5187.86 | 1730.29 | 1731.1 |
| | NO: 37 | | | | |
| A38 | SEQ ID | C₂₃₁H₃₆₆N₅₆O₇₆S | 5175.85 | 1726.28 | 1727.5 |
| | NO: 38 | | | | |
| A39 | SEQ ID | C₂₂₄H₃₄₄N₅₄O₇₃ | 4961.52 | 1654.84 | 1641 |
| | NO: 39 | | | | |
| A40 | SEQ ID | C₂₂₈H₃₄₆N₅₄O₇₂ | 4995.58 | 1666.19 | 1667.8 |
| | NO: 40 | | | | |
| A41 | SEQ ID | C₂₂₄H₃₄₅N₅₅O₇₂ | 4960.54 | 1654.51 | 1655.8 |
| | NO: 41 | | | | |
| A42 | SEQ ID | C₂₂₅H₃₄₉N₅₅O₇₁ | 4960.58 | 1654.53 | 1655.7 |
| | NO: 42 | | | | |
| A43 | SEQ ID | C₂₂₃H₃₄₄N₅₄O₇₁ | 4917.51 | 1640.17 | 1641 |
| | NO: 43 | | | | |
| A44 | SEQ ID | C₂₂₅H₃₄₄N₅₆O₇₁ | 4969.55 | 1657.52 | 1658.9 |
| | NO: 44 | | | | |
| A45 | SEQ ID | C₂₂₅H₃₅₀N₅₄O₇₀ | 4931.58 | 1644.86 | 1646.4 |
| | NO: 45 | | | | |
| A46 | SEQ ID | C₂₂₇H₃₅₂N₅₄O₇₁ | 4973.62 | 1658.87 | 1660.1 |
| | NO: 46 | | | | |
| A47 | SEQ ID | C₂₂₆H₃₅₀N₅₄O₇₁ | 4959.59 | 1654.2 | 1655.8 |
| | NO: 47 | | | | |
| A48 | SEQ ID | C₂₂₁H₃₄₂N₅₂O₇₀ | 4847.46 | 1616.82 | 1618.3 |
| | NO: 48 | | | | |
| A49 | SEQ ID | C₂₂₁H₃₄₂N₅₄O₇₀ | 4875.48 | 1626.16 | 1626.7 |
| | NO: 49 | | | | |
| A50 | SEQ ID | C₂₂₃H₃₄₇N₅₅O₆₉ | 4902.55 | 1635.18 | 1636.8 |
| | NO: 50 | | | | |
| A51 | SEQ ID | C₂₂₆H₃₅₃N₅₅O₆₉ | 4944.63 | 1649.21 | 1650.7 |
| | NO: 51 | | | | |
| A52 | SEQ ID | C₂₂₆H₃₄₈N₅₆O₆₉ | 4953.59 | 1652.2 | 1653.3 |
| | NO: 52 | | | | |
| A53 | SEQ ID | C₂₂₆H₃₅₃N₅₇O₆₉ | 4972.64 | 1658.55 | 1660.1 |
| | NO: 53 | | | | |
| A54 | SEQ ID | C₂₂₆H₃₄₈N₅₄O₇₃ | 4989.58 | 1664.19 | 1665.3 |
| | NO: 54 | | | | |
| A55 | SEQ ID | C₂₂₆H₃₄₉N₅₅O₇₂ | 4988.59 | 1663.85 | 1665.4 |
| | NO: 55 | | | | |
| A56 | SEQ ID | C₂₂₅H₃₄₈N₅₄O₇₁ | 4945.57 | 1649.52 | 1650.6 |
| | NO: 56 | | | | |
| A57 | SEQ ID | C₂₂₈H₃₅₀N₅₆O₇₀ | 4995.63 | 1666.21 | 1667.8 |
| | NO: 57 | | | | |
| A58 | SEQ ID | C₂₂₇H₃₅₁N₅₃O₇₂ | 4974.6 | 1659.2 | 1660.5 |
| | NO: 58 | | | | |
| A59 | SEQ ID | C₂₂₉H₃₅₈N₅₄O₇₀ | 4987.69 | 1663.56 | 1664.4 |
| | NO: 59 | | | | |
| A60 | SEQ ID | C₂₂₆H₃₅₁N₅₃O₇₁ | 4946.59 | 1649.86 | 1650.7 |
| | NO: 60 | | | | |
| A61 | SEQ ID | C₂₂₅H₃₄₄N₅₆O₇₁ | 4969.55 | 1671.53 | 1659 |
| | NO: 61 | | | | |
| A62 | SEQ ID | C₂₂₆H₃₄₉N₅₇O₆₉ | 4968.61 | 1657.52 | 1658.4 |
| | NO: 62 | | | | |
| A63 | SEQ ID | C₂₂₈H₃₅₁N₅₇O₇₀ | 5010.65 | 1657.2 | 1672.7 |
| | NO: 63 | | | | |
| A64 | SEQ ID | C₂₂₅H₃₄₅N₅₇O₇₀ | 4968.56 | 1671.22 | 1658.4 |
| | NO: 64 | | | | |
| A65 | SEQ ID | C₂₃₇H₃₆₅N₅₇O₇₈ | 5260.85 | 1316.21 | 1317.4 |
| | NO: 65 | | | | |
| A66 | SEQ ID | C₂₃₄H₃₅₉N₅₇O₇₈ | 5218.77 | 1305.69 | 1306.5 |
| | NO: 66 | | | | |
| A67 | SEQ ID | C₂₃₄H₃₅₈N₅₆O₈₀ | 5235.75 | 1309.94 | 1311.3 |
| | NO: 67 | | | | |
| A68 | SEQ ID | C₂₃₃H₃₅₄N₅₆O₈₀ | 5219.71 | 1305.93 | 1306.5 |
| | NO: 68 | | | | |
| A69 | SEQ ID | C₂₃₁H₃₅₁N₅₅O₈₀ | 5178.65 | 1295.66 | 1296.7 |
| | NO: 69 | | | | |
| A70 | SEQ ID | C₂₃₃H₃₅₃N₅₅O₈₁ | 5220.69 | 1306.17 | 1307.2 |
| | NO: 70 | | | | |
| A71 | SEQ ID | C₂₃₁H₃₅₂N₅₆O₇₉ | 5177.67 | 1295.42 | 1296.6 |
| | NO: 71 | | | | |
| A72 | SEQ ID | C₂₃₂H₃₅₄N₅₆O₇₉ | 5191.7 | 1298.93 | 1299.7 |
| | NO: 72 | | | | |
| A73 | SEQ ID | C₂₃₃H₃₅₆N₅₆O₇₉ | 5205.72 | 1302.43 | 1303.1 |
| | NO: 73 | | | | |
| A74 | SEQ ID | C₂₂₆H₃₅₅N₅₅O₆₈ | 4930.64 | 1233.66 | 1234.6 |
| | NO: 74 | | | | |
| A75 | SEQ ID | C₂₃₁H₃₅₄N₅₄O₇₁ | 5023.68 | 1256.92 | 1256.9 |
| | NO: 75 | | | | |
| A76 | SEQ ID | C₂₂₄H₃₄₄N₅₄O₇₃ | 4961.52 | 1241.38 | 1243.1 |
| | NO: 76 | | | | |
| A77 | SEQ ID | C₂₂₃H₃₄₇N₅₅O₇₀ | 4918.54 | 1635.51 | 1641.8 |
| | NO: 77 | | | | |
| A78 | SEQ ID | C₂₂₄H₃₄₆N₅₄O₇₂ | 4947.54 | 1650.18 | 1650.8 |
| | NO: 78 | | | | |
| A79 | SEQ ID | C₂₃₂H₃₅₁N₅₅O₈₁ | 5206.66 | 1736.55 | 1737.9 |
| | NO: 79 | | | | |
| A80 | SEQ ID | C₂₃₃H₃₅₃N₅₅O₈₁ | 5220.69 | 1741.23 | 1742.9 |
| | NO: 80 | | | | |
| A81 | SEQ ID | C₂₃₄H₃₅₄N₅₆O₈₁ | 5247.72 | 1750.24 | 1751.5 |
| | NO: 81 | | | | |
| A82 | SEQ ID | C₂₃₃H₃₅₂N₅₆O₈₁ | 5233.69 | 1745.56 | 1747.8 |
| | NO: 82 | | | | |
| A83 | SEQ ID | C₂₃₄H₃₅₄N₅₆O₈₁ | 5247.72 | 1750.24 | 1751.5 |
| | NO: 83 | | | | |
| A84 | SEQ ID | C₂₃₂H₃₅₁N₅₅O₈₁ | 5206.66 | 1736.55 | 1737.6 |
| | NO: 84 | | | | |
| A85 | SEQ ID | C₂₂₂H₃₄₄N₅₄O₇₀ | 4889.5 | 1630.83 | 1631.8 |
| | NO: 85 | | | | |
| A86 | SEQ ID | C₂₂₃H₃₄₆N₅₄O₇₀ | 4903.53 | 1635.51 | 1637 |
| | NO: 86 | | | | |
| A87 | SEQ ID | C₂₂₃H₃₄₅N₅₅O₇₀ | 4930.56 | 1644.52 | 1646.2 |
| | NO: 87 | | | | |
| A88 | SEQ ID | C₂₂₃H₃₄₅N₅₅O₇₀ | 4916.53 | 1639.84 | 1641.2 |
| | NO: 88 | | | | |
| A89 | SEQ ID | C₂₂₄H₃₄₇N₅₅O₇₀ | 4930.56 | 1644.52 | 1646.2 |
| | NO: 89 | | | | |
| A90 | SEQ ID | C₂₂₅H₃₅₁N₅₅O₇₀ | 4943.56 | 1649.87 | 1650.8 |
| | NO: 90 | | | | |
| A91 | SEQ ID | C₂₂₄H₃₅₁N₅₅O₆₈ | 4899.57 | 1635.2 | 1637 |
| | NO: 91 | | | | |
| A92 | SEQ ID | C₂₃₂H₃₅₉N₅₅O₆₉ | 5019.63 | 1675.25 | 1676.6 |
| | NO: 92 | | | | |
| A93 | SEQ ID | C₂₃₀H₃₅₅N₅₅O₆₉ | 4991.6 | 1665.9 | 1667.6 |
| | NO: 93 | | | | |
| A94 | SEQ ID | C₂₂₉H₃₅₁N₅₅O₇₁ | 5007.55 | 1671.21 | 1672.9 |
| | NO: 94 | | | | |
| A95 | SEQ ID | C₂₂₈H₃₄₆N₅₂O₇₃ | 4980.5 | 1662.19 | 1663.8 |
| | NO: 95 | | | | |
| A96 | SEQ ID | C₂₂₄H₃₄₇N₅₅O₇₁ | 4946.55 | 1649.85 | 1650.8 |
| | NO: 96 | | | | |
| A97 | SEQ ID | C₂₂₂H₃₃₅N₅₃O₇₀ | 4866.42 | 1623.14 | 1624.2 |
| | NO: 97 | | | | |
| A98 | SEQ ID | C₂₁₇H₃₃₆N₅₄O₆₇ | 4773.39 | 1592.13 | 1593.3 |
| | NO: 98 | | | | |
| A99 | SEQ ID | C₂₁₇H₃₃₆N₅₄O₆₈ | 4789.39 | 1597.46 | 1599 |
| | NO: 99 | | | | |
| A100 | SEQ ID | C₂₁₆H₃₃₂N₅₄O₆₈ | 4773.34 | 1592.11 | 1593.3 |
| | NO: 100 | | | | |
| A101 | SEQ ID | C₂₂₂H₃₃₆N₅₄O₆₉ | 4865.44 | 1622.81 | 1624 |
| | NO: 101 | | | | |
| A102 | SEQ ID | C₂₁₆H₃₃₂N₅₄O₆₉ | 4789.34 | 1597.45 | 1599.1 |
| | NO: 102 | | | | |
| A103 | SEQ ID | C₂₂₂H₃₄₁N₅₅O₇₂ | 4932.48 | 1645.16 | 1646.7 |
| | NO: 103 | | | | |
| A104 | SEQ ID | C₂₂₄H₃₄₅N₅₅O₇₂ | 4960.54 | 1654.51 | 1656 |
| | NO: 104 | | | | |
| A105 | SEQ ID | C₂₂₆H₃₄₉N₅₅O₇₂ | 4988.59 | 1663.86 | 1665.3 |
| | NO: 105 | | | | |
| A106 | SEQ ID | C₂₂₄H₃₄₅N₅₅O₇₂ | 4960.54 | 1654.51 | 1655.7 |
| | NO: 106 | | | | |
| A107 | SEQ ID | C₂₂₃H₃₄₃N₅₅O₇₂ | 4946.51 | 1649.84 | 1650.9 |
| | NO: 107 | | | | |
| A108 | SEQ ID | C₂₂₅H₃₄₇N₅₅O₇₂ | 4974.56 | 1659.19 | 1660.7 |
| | NO: 108 | | | | |
| A109 | SEQ ID | C₂₂₇H₃₅₀N₅₆O₇₂ | 5015.62 | 1672.87 | 1674.2 |
| | NO: 109 | | | | |
| A110 | SEQ ID | C₂₂₅H₃₄₆N₅₆O₇₂ | 4987.56 | 1663.52 | 1664.4 |
| | NO: 110 | | | | |
| A111 | SEQ ID | C₂₂₃H₃₄₇N₅₅O₇₀ | 4918.54 | 1640.51 | 1641.7 |
| | NO: 111 | | | | |
| A112 | SEQ ID | C₂₂₄H₃₄₈N₅₆O₇₀ | 4945.57 | 1649.52 | 1649.9 |
| | NO: 112 | | | | |
| A113 | SEQ ID | C₂₂₄H₃₄₈N₅₆O₇₀ | 4945.57 | 1649.52 | 1650.8 |
| | NO: 113 | | | | |
| A114 | SEQ ID | C₂₂₃H₃₄₆N₅₆O₇₀ | 4931.54 | 1644.85 | 1646.3 |
| | NO: 114 | | | | |
| A115 | SEQ ID | C₂₂₂H₃₄₅N₅₅O₇₀ | 4904.52 | 1635.84 | 1637 |
| | NO: 115 | | | | |
| A116 | SEQ ID | C₂₂₉H₃₄₇N₅₅O₇₃ | 5038.61 | 1680.54 | 1681.8 |
| | NO: 116 | | | | |
| A117 | SEQ ID | C₂₂₃H₃₄₅N₅₅O₆₉ | 4900.53 | 1634.51 | 1636.9 |
| | NO: 117 | | | | |
| A118 | SEQ ID | C₂₂₃H₃₄₅N₅₅O₆₉ | 4900.53 | 1634.51 | 1635.9 |
| | NO: 118 | | | | |
| A119 | SEQ ID | C₂₂₄H₃₄₆N₅₄O₇₀ | 4915.54 | 1639.51 | 1641.3 |
| | NO: 119 | | | | |
| A120 | SEQ ID | C₂₂₅H₃₄₇N₅₃O₇₀ | 4914.55 | 1639.18 | 1641.2 |
| | NO: 120 | | | | |
| A121 | SEQ ID | C₂₂₅H₃₄₇N₅₃O₇₀ | 4914.55 | 1639.18 | 1641.2 |
| | NO: 121 | | | | |
| A122 | SEQ ID | C₂₂₀H₃₄₆N₅₄O₇₁S | 4915.56 | 1639.52 | 1641.2 |
| | NO: 122 | | | | |
| A123 | SEQ ID | C₂₂₃H₃₄₁N₅₁O₇₄ | 4920.46 | 1641.15 | 1642 |
| | NO: 123 | | | | |
| A124 | SEQ ID | C₂₁₉H₃₄₁N₅₁O₇₃S | 4888.48 | 1630.49 | 1632.2 |
| | NO: 124 | | | | |
| A125 | SEQ ID | C₂₂₀H₃₄₄N₅₄O₇₃S | 4945.54 | 1649.51 | 1650.8 |
| | NO: 125 | | | | |
| A126 | SEQ ID | C₂₂₃H₃₃₉N₅₁O₇₃ | 4902.45 | 1635.15 | 1637 |
| | NO: 126 | | | | |
| A127 | SEQ ID | C₂₂₂H₃₄₀N₅₂O₇₁ | 4873.46 | 1625.49 | 1625.7 |
| | NO: 127 | | | | |
| A128 | SEQ ID | C₂₂₈H₃₄₄N₅₂O₇₂ | 4965.55 | 1656.18 | 1657.7 |
| | NO: 128 | | | | |
| A129 | SEQ ID | C₂₃₁H₃₅₁N₅₃O₇₂ | 5022.65 | 1675.22 | 1676.8 |
| | NO: 129 | | | | |
| A130 | SEQ ID | C₂₂₄H₃₄₁N₅₁O₇₃ | 4916.48 | 1639.83 | 1641.2 |
| | NO: 130 | | | | |
| A131 | SEQ ID | C₂₂₃H₃₄₂N₅₂O₇₁ | 4887.48 | 1630.16 | 1631.8 |
| | NO: 131 | | | | |
| A132 | SEQ ID | C₂₂₄H₃₄₉N₅₅O₇₀ | 4932.57 | 1645.19 | 1646.5 |
| | NO: 132 | | | | |
| A133 | SEQ ID | C₂₂₄H₃₄₆N₅₄O₇₂ | 4947.54 | 1650.18 | 1651 |
| | NO: 133 | | | | |
| A134 | SEQ ID | C₂₂₅H₃₅₁N₅₅O₇₀ | 4946.6 | 1649.87 | 1650.8 |
| | NO: 134 | | | | |
| A135 | SEQ ID | C₂₂₆H₃₄₉N₅₃O₇₀ | 4928.58 | 1643.86 | 1645.3 |
| | NO: 135 | | | | |
| A136 | SEQ ID | C₂₂₆H₃₄₇N₅₂O₇₂ | 4944.52 | 1649.17 | 1650.1 |
| | NO: 136 | | | | |
| A137 | SEQ ID | C₂₂₄H₃₄₅N₅₃O₇₀ | 4900.53 | 1634.51 | 1636 |
| | NO: 137 | | | | |
| A138 | SEQ ID | C₂₂₅H₃₄₇N₅₃O₇₀ | 4914.55 | 1639.18 | 1641 |
| | NO: 138 | | | | |
| A139 | SEQ ID | C₂₂₃H₃₄₇N₅₅O₇₀ | 4918.54 | 1640.51 | 1642 |
| | NO: 139 | | | | |
| A140 | SEQ ID | C₂₂₇H₃₅₁N₅₃O₇₀ | 4942.61 | 1648.54 | 1649.8 |
| | NO: 140 | | | | |
| A141 | SEQ ID | C₂₂₂H₃₄₃N₅₅O₆₉ | 4886.5 | 1629.83 | 1631 |
| | NO: 141 | | | | |
| A142 | SEQ ID | C₂₂₇H₃₅₃N₅₅O₇₁ | 4988.64 | 1248.16 | 1248.9 |
| | NO: 142 | | | | |
| A143 | SEQ ID | C₂₃₇H₃₆₆N₅₆O₇₇ | 5231.85 | 1308.96 | 1309.9 |
| | NO: 143 | | | | |
| A144 | SEQ ID | C₂₃₃H₃₆₀N₅₆O₇₆ | 5161.76 | 1291.44 | 1292.6 |
| | NO: 144 | | | | |
| A145 | SEQ ID | C₂₄₀H₃₆₈N₅₈O₇₆ | 5281.91 | 1321.48 | 1323.4 |
| | NO: 145 | | | | |
| A146 | SEQ ID | C₂₃₅H₃₆₂N₅₆O₇₇ | 5203.8 | 1301.95 | 1302.9 |
| | NO: 146 | | | | |
| A147 | SEQ ID | C₂₃₄H₃₅₈N₅₆O₇₉ | 5219.75 | 1305.94 | 1307 |
| | NO: 147 | | | | |
| A148 | SEQ ID | C₂₃₅H₃₆₃N₅₇O₇₇ | 5218.81 | 1305.7 | 1306.5 |
| | NO: 148 | | | | |
| A149 | SEQ ID | C₂₃₈H₃₆₄N₅₈O₇₆ | 5253.86 | 1314.47 | 1315.9 |
| | NO: 149 | | | | |
| A150 | SEQ ID | C₂₃₈H₃₆₅N₅₉O₇₆ | 5268.88 | 1318.22 | 1320.1 |
| | NO: 150 | | | | |
| A151 | SEQ ID | C₂₃₅H₃₆₂N₅₈O₇₃ | 5167.81 | 1292.95 | 1294 |
| | NO: 151 | | | | |
| A152 | SEQ ID | C₂₂₉H₃₅₀N₅₆O₇₂ | 5039.64 | 1260.91 | 1262.3 |
| | NO: 152 | | | | |
| A153 | SEQ ID | C₂₂₉H₃₅₁N₅₇O₇₁ | 5038.66 | 1260.67 | 1262.5 |
| | NO: 153 | | | | |
| A154 | SEQ ID | C₂₃₇H₃₆₀N₅₈O₇₈ | 5269.82 | 1318.46 | 1319.8 |
| | NO: 154 | | | | |
| A155 | SEQ ID | C₂₃₇H₃₆₁N₅₉O₇₇ | 5268.83 | 1318.21 | 1319.1 |
| | NO: 155 | | | | |
| A156 | SEQ ID | C₂₃₈H₃₆₆N₅₈O₇₅ | 5239.88 | 1310.97 | 1312.3 |
| | NO: 156 | | | | |
| A157 | SEQ ID | C₂₂₂H₃₄₂N₅₄O₇₂ | 4919.48 | 1230.87 | 1232.2 |
| | NO: 157 | | | | |
| A158 | SEQ ID | C₂₂₅H₃₅₁N₅₅O₇₀ | 4946.6 | 1237.65 | 1239.3 |
| | NO: 158 | | | | |
| A159 | SEQ ID | C₂₃₀H₃₄₇N₅₅O₈₁ | 5178.61 | 1295.65 | 1296.8 |
| | NO: 159 | | | | |
| A160 | SEQ ID | C₂₃₁H₃₅₁N₅₅O₇₉ | 5162.66 | 1291.67 | 1293 |
| | NO: 160 | | | | |
| A161 | SEQ ID | C₂₃₄H₃₅₇N₅₅O₇₉ | 5204.74 | 1302.19 | 1303.1 |
| | NO: 161 | | | | |
| A162 | SEQ ID | C₂₂₂H₃₄₅N₅₃O₆₈ | 5414.51 | 1617.6 | 1617.6 |
| | NO: 162 | | | | |

### Example 3. Stability of Long Acting GLP Receptor Agonist Polypeptides

[1102] Several long acting GLP-1 receptor agonist polypeptides described herein were tested, as the trifluoro acetate salt, for stability in DMSO (i.e., organosulfur solvent) or in aqueous (i.e., in DI water) at 1 mg/ml solution. These analog polypeptides were incubated at 37° C., and samples were withdrawn at various time intervals and analyzed by LC/MS and HPLC for determination of purity and mass of the parent peptide and extent of any degradation products. The purity results of these analyses are shown in Table 11 and are considered indicative of stability.

TABLE 11
Stability of long acting GLP−1 receptor agonist polypeptides

| | | Stability @ RT | | Stability @ 37° C. | | |
|---|---|---|---|---|---|---|
| Compound #, as its | | (% purity) | | (% purity) | | |
| TFA salt unless | | Day | Day | Day | Day | Day |
| indicated otherwise | Solute | 0 | 14 | 28 | 14 | 28 |
| A36 | DI | 89.8 | 88 | 87.1 | 85.1 | 78 |
| | H₂O | | | | | |
| A36 | Saline | 88.2 | 94.5 | 85.7 | 80.4 | 75.5 |
| | | (c) | | | | (p) |
| A54 | DI | 98.4 | 90.4 | 97 | 92.6 | 87 |
| | H₂O | | | | | |
| A54 | Saline | 98.2 | 97.2 | 97.3 | 94.3 | 88.9 |
| A55 | DI | 93.6 | — | — | — | — |
| (acetate salt) | H₂O | | | | | |
| A55 | Saline | 98.3 | — | — | — | — |
| (acetate salt) | | | | | | |
| A162 | DI | 95.8 | 94.7 | 94.5 | 96.6 | — |
| | H₂O | | | | | |
| A162 | Saline | 97.9 | 93.7 | 94.9 | 96.7 | 85.5 |
| | | | | | | (c) |
| A152 | DI | 90.6 | 90.7 | 91.7 | 96.4 | 90.6 |
| | H₂O | | | | | |
| A152 | Saline | 91.2 | 89.6 | 90.7 | 85.2 | 83.8 |
| A154 | DI | 96.9 | 96.1 | 94.7 | 92.6 | — |
| | H₂O | | | | | |
| A154 | Saline | 94 | 97 | 92.4 | 92.8 | — |
| A68 | DI | 97.4 | 94.2 | 93.7 | 98.4 | (p) |
| | H₂O | | | | | |
| A68 | Saline | 96 | 95.2 | 95.2 | 94.9 | — |
| | | (p) | | | | |
| A72 | DI | 98.9 | 96.2 | 95.1 | N/A | — |
| | H₂O | | | | | |
| A72 | Saline | 98.5 | 97.4 | — | 98.7 | — |
| A80 | DI | 95.8 | 91.9 | 90.3 | 94.6 | (p) |
| | H₂O | (c) | | | | |
| A80 | Saline | 96.6 | 95.2 | 91.9 | 90.9 | (p) |
| | | (p) | | | | |
| A87 | DI | 96.6 | 94.4 | 90.1 | 91 | |
| | H₂O | | | | | |
| A87 | Saline | 97.5 | 91.6 | 89.6 | 83.9 | — |
| A88 | DI | 96.9 | 94.6 | 93 | 97.5 | — |
| | H₂O | | | | | |
| A88 | Saline | 97.2 | 93.6 | 92.1 | 95 | — |
| A96 | DI | 99.1 | 97.7 | 97.6 | 96.1 | — |
| | H₂O | | | | | |
| A96 | Saline | 98.1 | 96.3 | 96.1 | 93.2 | — |
| A103 | DI | 83.6 | 89.4 | 88.2 | 91 | — |
| | H₂O | | | | | |
| A103 | Saline | 78.9 | 86.4 | 86 | 94.9 | — |
| A107 | DI | 99.5 | 97.4 | 97 | 92.7 | — |
| | H₂O | | | | | |
| A107 | Saline | 97.5 | 93.5 | 94.3 | 96.8 | — |
| A111 | DI | 99 | 96.4 | 96.2 | 91.9 | — |
| | H₂O | | | | | |
| A111 | Saline | 98.3 | 91.7 | 92.7 | 95.7 | — |
| A112 | DI | 98.2 | 96.1 | 97.9 | 92.9 | — |
| | H₂O | | | | | |
| Al12 | Saline | 98.4 | 97.5 | 96.5 | 92.2 | — |
| A114 | DI | 98.3 | 95.7 | 97.5 | 95.4 | — |
| | H₂O | | | | | |
| A114 | Saline | 97.5 | 95.2 | 95.2 | 95.5 | — |
| A115 | DI | 98.5 | 97.4 | 96.6 | 94.5 | — |
| | H₂O | | | | | |
| A115 | Saline | 98.5 | 96.9 | 96 | 94.3 | — |
| A120 | DI | 96.7 | — | — | — | — |
| (acetate salt) | H₂O | | | | | |
| A120 | Saline | 98.5 | — | — | — | — |
| (acetate salt) | | | | | | |
| A132 | DI | 98.6 | 96.4 | 96.3 | 94.4 | — |
| | H₂O | | | | | |
| A132 | Saline | 98.5 | 93.6 | 96.3 | 93.4 | — |
| A134 | DI | 98 | 94.5 | 96.8 | — | — |
| | H₂O | | | | | |
| A134 | Saline | 99 | 92.7 | — | 96.1 | — |
| A139 | DI | 99.2 | 95.4 | 97.3 | — | — |
| | H₂O | | | | | |
| A139 | Saline | 97.5 | 95.1 | 96.9 | 97 | — |

(c) = cloudy,
(p) = particulates
“—” = not determined

### Example 4: Solubility of Long Acting GLP-1 Receptor Agonist Polypeptides

[1103] Certain long acting GLP-1 receptor agonist polypeptides described herein were tested for solubility in saline or in DI water at room temperature. Samples were visually inspected for clarity of the sample, and any appearance of turbidity or haziness. The results of these analyses are shown in Table 12.

TABLE 12
Solubility of long acting GLP-1
receptor agonist polypeptides

| Compound #, as its | Solubility | Solubility |
|---|---|---|
| TFA salt unless | (mg/mL) | (mg/mL) |
| indicated otherwise | in DI water | in saline |
| A36 | >80 | >51 |
| A55 | >31 | >36 |
| (acetate salt) | | |
| A54 | >94 | >149 |
| A162 | >101 | >101 |
| A152 | >109 | >101 |
| A154 | >70 | >106 |
| A68 | >53 | >117 |
| A80 | >78 | >75 |
| A87 | >88 | >104 |
| A88 | >81 | >107 |
| A96 | >128 | >133 |
| A103 | >62 | >180 |
| A107 | >98 | >148 |
| A111 | >165 | >164 |
| A112 | >122 | >179 |
| A114 | >93 | >127 |
| A115 | >143 | >146 |
| A120 | >18 | >56 |
| (acetate salt) | | |
| A132 | >192 | >138 |
| A134 | >61 | >134 |
| A139 | >108 | >183 |

### Example 5: Functional Assays of Long Acting GLP-1 Receptor Agonist Polypeptides: Human and Rat Receptors (GLP-1Rs)

[1104] Activation of the human and rat GLP-1 receptors (GLP-1R), leads to increases in cellular cyclic adenosine monophosphate (cAMP). In the presence of the non-specific cAMP/cGMP phosphodiesterase inhibitor, 3-isobutyl-1-methylxanthine (IBMX), accumulating cAMP can be measured in vitro using common detection methods. Thus, it is possible to estimate an in vitro potency (pEC50) for peptides activating each of these receptors using fit dose-response curves for cAMP accumulation.

Cell Handling and cAMP Accumulation Assays

[1105] CHO-K1 cells stably expressing human GLP-1R (Genebank accession #NM_002062) were grown in 90% F12-K media supplemented with 10% FBS and 250 g/ml G418. For rat GLP-1R expression, a cDNA fragment encoding the full-length open reading frame of the rat GLP-1R (Genebank accession #NM 012728) was sub-cloned into the expression vector pcDNA3.1+ to enable transient receptor expression in CHO-K1 cells.

[1106] On day 1, CHO-K1 cells were plated at 1.5 million cells per T75 flask in 90% F12-K media supplemented with 10% FBS. On day 3 cells were transfected with 40 mcg of the rat GLP1R expression plasmid using Lipofectamine 2000 transfection reagent. On day 5, human or rat GLP-1R expressing cells were dispensed at 1000 cells per well in white 384-well OptiPlates in 5 mcL of assay buffer consisting of 1×HBSS, 5 mM HEPES, 0.5 mM IBMX, and 0.1% casein.

[1107] Peptides were serially diluted 4-fold in assay buffer to final concentrations ranging from 1×10⁻⁹ M to 9.5×10⁻¹⁶ M. Two assay controls consisting of 50 mcM forskolin (cAMP system maximum) or assay buffer only (cAMP system minimum) were also prepared. Five microliters of each peptide-concentration, or assay control, was added to triplicate wells and incubated for thirty minutes at room temperature. During this incubation step a 4× europium labelled cAMP tracer solution and a 4× Ulight®-anti-cAMP solution (consisting of an anti-cAMP monoclonal antibody labelled with Ulight™ dye) was prepared according to the manufacturer's protocol (PerkinElmer LANCE Ultra cAMP kit). Following this incubation, 5 mcL europium labelled cAMP and 5 mcL Ulight anti-cAMP antibody was added to each well. The plate was covered to prevent evaporation and incubated for 60 minutes at room temperature in the dark. Plates were read on an Envision fluorescent plate reader (PerkinElmer).

### Data Analysis

[1108] Test values were first normalized to the system maximum and system minimum averaged values in Excel using the formula: (test value−system min average)/(system max average−system min average)*100. Normalized test values represent a baseline corrected percentage of the system maximum cAMP response induced by forskolin. Data from up to 3 replicate tests were analyzed for each peptide. Potency values were estimated using GraphPad Prism software (v7.04) by fitting data to a 4-parameter logistic curve model: Y=Bottom+(Top−Bottom)/(1+10\hat{ }((Log EC50−X))). The Hill slope was constrained to 1.0. EC50 values were converted to pEC50 values using the formula: pEC50=−Log (EC50). Mean pEC50 values and 95% confidence intervals are reported in Table 13.

TABLE 13
Mean pEC50 values on hGLP-1R and rGLP-1R

| | hGLP-1R pEC50 | rGLP-1R pEC50 |
|---|---|---|
| Compound # | (0.1% casein) | (0.1% casein) |
| GLP-1 (7-36) | 12.1 | 11.9 |
| exenatide | 12.1 | 12.0 |
| A120 | 12.2 | 11.9 |
| A55 | 12.0 | 11.8 |
| A115 | 12.3 | 12.0 |
| A132 | 12.1 | 11.6 |
| A77 | 12.3 | 12.1 |
| A108 | 12.0 | 11.9 |
| A134 | 12.0 | 11.6 |
| A45 | 11.7 | 11.6 |
| A139 | 12.1 | 11.7 |
| A114 | 12.2 | 12.0 |
| A112 | 12.1 | 11.9 |
| A46 | 11.9 | — |
| A54 | 12.0 | 11.9 |
| A78 | 11.9 | 11.9 |
| A111 | 12.1 | 11.8 |
| A6 | 12.0 | 11.8 |
| A68 | 12.2 | 12.2 |
| A107 | 12.3 | 11.9 |
| A89 | 12.1 | 11.7 |
| A94 | 12.2 | — |
| A70 | 12.1 | 11.7 |
| A103 | 12.2 | 11.8 |
| A71 | 12.1 | 11.9 |
| A147 | 12.1 | 11.7 |
| A74 | 12.0 | 11.5 |
| A149 | 11.9 | 11.7 |
| A86 | 12.1 | 11.7 |
| A85 | 12.1 | 11.8 |
| A87 | 12.0 | 11.6 |
| A88 | 12.0 | 11.6 |
| A63 | 11.7 | 11.8 |
| A92 | 11.7 | — |
| A75 | 11.7 | 11.4 |

“—” = not determined

### Example 6: Intravenous Infusion of Long Acting GLP-1 Receptor Agonist Polypeptides: Studies to Assess Intravenous Pharmacokinetics of Polypeptides

[1109] Peptides were dissolved in 0.05% TWEEN-20® (polysorbate 20) in phosphate buffered saline and administered as a 1-hour intravenous infusion to non-fasted male Sprague-Dawley rats (n=3 per group) via femoral vein cannula at a final dose of 0.033 mg/kg. Formulations were administered at a rate of 1.67 mL/kg/h. Blood samples (approximately 250 μL) were collected for pharmacokinetic analysis via a jugular vein cannula at 0.25, 0.5, 0.75, 1, 1.17, 1.33, 1.5, 2, 4, 8, 24, 48, 72, and 96 hours post-start of infusion into microtainer tubes containing K₂EDTA as anticoagulant and 25 μL of a protease inhibitor cocktail. Plasma was prepared by centrifugation and stored at −80° C. until analysis. The results of this analysis are shown in Table 14.

### Example 7: Subcutaneous Bolus Injection of Long Acting GLP-1 Receptor Agonist Polypeptides: Studies to Assess Bioavailability of Polypeptides

[1110] Peptides were dissolved in 0.05% TWEEN-20® (polysorbate 20) in phosphate buffered saline and administered to non-fasted male Sprague-Dawley rats (n=3 per group) at a dose of 0.100 mg/kg via a single bolus injection into the subcutaneous space between the scapulae. Blood samples (approximately 250 μL) were collected for pharmacokinetic analysis via a jugular vein cannula at 0.083, 0.25, 0.5, 1, 2, 4, 8, 24, 48, 72, and 96 hours post-dose into microtainer tubes containing K₂EDTA as anticoagulant and 25 μL of a protease inhibitor cocktail. Plasma was prepared by centrifugation and stored at −80° C. until analysis. The results of this analysis are also shown in Table 14.

TABLE 14
Pharmacokinetic analyses

| Compound # | CL mg/min/Kg | T_{1/2} (IV) hrs | % F (SC Bolus) |
|---|---|---|---|
| A120 | 0.054 | 15.8 | 92.9 |
| A55 | 0.054 | 14.7 | 62.6 |
| A115 | 0.058 | 16.7 | 63.4 |
| A132 | 0.048 | 9.7 | 41.7 |
| A77 | 0.086 | 12.9 | 55.7 |
| A108 | 0.061 | 13.7 | 58.6 |
| A134 | 0.108 | 7.91 | 45.3 |
| A45 | 0.054 | 13.3 | 24.0 |
| A139 | 0.092 | 20.9 | 58.1 |
| A114 | 0.061 | 16.0 | 44.2 |
| A112 | 0.041 | 10.8 | 39.5 |
| A46 | 0.057 | 17.0 | 23.0 |
| A54 | 0.057 | 15.6 | 58.4 |
| A78 | 0.077 | 11.0 | 52.1 |
| A111 | 0.075 | 13.6 | 59.9 |
| A6 | 0.148 | 9.81 | 45.0 |
| A68 | 0.100 | 17.1 | 75.2 |
| A107 | 0.165 | 13.5 | — |
| A89 | 0.102 | 13.5 | — |
| A94 | 0.060 | 20.3 | — |
| A70 | 0.092 | 18.4 | — |
| A103 | 0.131 | 16.8 | — |
| A71 | 0.098 | 18.5 | — |
| A147 | 0.056 | 18.3 | — |
| A74 | 0.152 | 8.04 | — |

“—” = not determined

### Example 8: Method of Plasma Sample Preparation for Pharmacokinetic Studies

### Protein Precipitation

[1111] A 60 μL aliquot of each plasma sample was placed into to an Impact Protein Precipitation 96-well filter plate (Phenomenex, Torrance, CA). To each well was added 6 μL of 0.5% TWEEN-20® (polysorbate 20). Plates were then vortexed mixed for 10 minutes at 1200 rpm before 180 μL of 0.1% TFA in 2:1 ethanol:acetonitrile containing an appropriate internal standard was added to each well. Plates were vortex mixed for 5 min at 1400 rpm, and then centrifuged for 10 min at 500×g. Filtrates were evaporated under a nitrogen stream at 45° C. Residues were reconstituted in 80 μL of 20% acetonitrile (aq) containing 0.1% formic acid.

### Example 9: LC/MS Quantification of Long Acting GLP-1 Receptor Agonist Polypeptides in Plasma

[1112] All calibration standards were prepared in control rat plasma containing K₂EDTA and protease inhibitor cocktail.

[1113] Samples and standards were analyzed by TurboIonSpray™ UPLC-MS/MS using a system consisting of a CTC HTS PAL auto-injector (Leap, Carrboro, NC), an Agilent Infinity 1290 system with column oven (Palo Alto, CA), a Valco switching valve (Houston, TX), and either an AB Sciex API 5600 TripleTOF™ or Sciex API 4000QTrap mass spectrometer (Framingham, MA). Samples were injected onto a 2.1×50 mm reverse phase C18 analytical column, typically a Waters CORTECS UPLC C18+, 1.6 μm (Waters Corporation, Milford, MA) or similar. Chromatographic separation was achieved with a gradient method using water containing 0.1% formic acid (A) and acetonitrile containing 0.1% formic acid (B) as mobile phase. Initial conditions consisted of 90% A and 10% B. The organic component was increased to 95% B over a period of 2-3 minutes, depending on the peptide. Typical flow rates were 600 μL/min. The column temperature was held constant at 50° C. Peptides were quantified by monitoring one or more product ions produced from a multiply charged parent ion.

### Example 10: In Vivo Efficacy of Long Acting GLP-1 Receptor Agonist Polypeptides on Food Intake Inhibition in Rats

[1114] Acute food intake was measured continuously for a 96-hour period using a BioDAQ food monitoring system (Research Diets, New Brunswick, NJ) to determine the amount of food intake inhibition exhibited by these long acting GLP-1 receptor agonist polypeptides. Long Evans rats were obtained at approximately 8 weeks of age. The rats were singly housed and acclimated to 45% high fat diet for at least 2 weeks prior to dosing. After 1 week of acclimation all rats were singly housed in BioDAQ cages (Research Diets, New Brunswick, NJ) and maintained at constant temperature (approximately 22° C.) and 30-70% relative humidity with 12 hr light/dark cycle (lights on from 5:00 AM to 5:00 PM). The rats were given ad libitum access to water and pellet chow (Research Diets D12451i, 45 kcal % fat, Research Diets, New Brunswick, NJ). All procedures were performed in compliance with the Animal Welfare Act, USDA regulations and approved by the Mispro Institutional Animal Care and Use Committee. Animals were randomized into treatment groups according to body weight (n=8 rats/group). Animals were dosed (SC bolus injection) with either a long acting GLP-1 receptor agonist polypeptide (30 mcg/kg) or vehicle control (saline) and were dosed between 4:30 and 5:00 prior to lights out with hoppers gated while animals were being dosed. Hopper gates were opened, and continuous data collection started immediately following completion of dosing. Data was initially analyzed using the BioDAQ Viewer software (version 2.3.07) and bout filters were set if needed to reduce noise in data associated with non-feeding behavior. All the data are expressed as % inhibition from vehicle control and summarized as mean. The data were analyzed for statistical significance with Microsoft Excel (Redmond, WA) by 2-sample t-test. P-values<0.05 were considered to indicate a significant difference between treatment groups. Acute % food intake inhibition from vehicle control results for the long acting GLP-1 receptor agonist polypeptides are shown in Table 15.

TABLE 15
Acute % food intake inhibition in rats after bolus SC
dosing of LA GLP-1 analog polypeptides.

| | Acute Food Intake Assay (30 mcg SC bolus) | | | |
|---|---|---|---|---|
| Compound | % Food Intake Inhibition from Vehicle | | | |
| # | 0-24 hr | 25-48 hr | 49-72 hr | 73-96 hr |
| A120 | −38.2 | −68.3 | −29.4 | 8.0 |
| A132 | −26.4 | −70.0 | −26.4 | −12.9 |
| A115 | −28.9 | −71.0 | −21.2 | 15.4 |
| A55 | −42.4 | −70.4 | −64.7 | −0.8 |
| A135 | −52.6 | −62.2 | −29.4 | −8.0 |
| A137 | −67.0 | −69.0 | −25.7 | −14.7 |
| A77 | −62.9 | −56.6 | −20.3 | −0.9 |
| A108 | −34.4 | −61.7 | −27.4 | −11.3 |
| A134 | −25.1 | −65.0 | −26.9 | −4.7 |
| A45 | −36.0 | −84.1 | −12.5 | −22.7 |
| A139 | −31.1 | −71.9 | −20.0 | −8.4 |
| A114 | −38.3 | −36.0 | −4.7 | 30.2 |
| A112 | −42.2 | −54.9 | −21.3 | 11.9 |
| A46 | −48.3 | −70.6 | −46.1 | −25.3 |
| A54 | −38.3 | −82.8 | −36.9 | −12.4 |
| A78 | −62.2 | −47.2 | −6.7 | −0.6 |
| A111 | −22.7 | −54.0 | −23.9 | −9.5 |
| A6 | −64.2 | −48.8 | −8.8 | 9.7 |
| A68 | −59.5 | −66.1 | −56.6 | −11.8 |
| A107 | −60.8 | −39.1 | −11.6 | 2.6 |
| A94 | −37.0 | −52.4 | −10.4 | 9.6 |
| A70 | −52.3 | −70.2 | −54.1 | −31.9 |
| A103 | −17.3 | −4.8 | 9.0 | 21.2 |
| A147 | −54.2 | −52.8 | −40.2 | 6.1 |
| A149 | −4.8 | −9.7 | −12.1 | 25.2 |
| A62 | −37.1 | −48.8 | −47.4 | 19.5 |

Bold = P < 0.05 vs. vehicle

### Example 11: In Vivo Efficacy on Body Weight Changes in LE Rats after Bolus SC Dosing of Long Acting GLP-1 Receptor Agonist Polypeptides

[1115] Body weights were measured on the same LE rats used for measuring food intake in Example 11 to investigate the efficacy and durability of the long acting GLP-1 receptor agonist polypeptides on weight loss after bolus SC dosing (30 mcg/kg). The data were analyzed in Excel and/or Prism (GraphPad Software, Inc., La Jolla, CA) using one-way ANOVA to compare each group to the appropriate control group. P-values<0.05 were considered to indicate a significant difference between treatment groups. The mean weight loss (%) from baseline and vehicle control (ΔΔ %) from the food intake studies are shown in Table 16.

TABLE 16
The mean weight loss (%) from baseline
and vehicle control (ΔΔ %) from the food intake

| | Weight Loss (30 mcg/kg SC bolus) | | | | | |
|---|---|---|---|---|---|---|
| Compound | % Weight change from Vehicle | | | | | |
| # | 1 d | 2 d | 3 d | 4 d | 5 d | 6 d |
| A120 | −4.6 | −7.6 | −6.9 | — | — | — |
| A132 | −4.7 | −9.1 | −8.9 | −6.3 | — | — |
| A115 | −4.5 | −6.9 | −6.2 | — | — | — |
| A55 | −3.5 | — | −8.6 | −7.0 | — | −5.5 |
| A135 | −4.3 | −7.4 | −6.4 | −4.2 | — | — |
| A137 | −4.7 | −6.6 | −6.0 | −4.8 | — | — |
| A77 | −3.2 | −5.3 | −4.7 | −4.2 | — | — |
| A108 | −3.9 | −6.2 | −4.7 | −4.0 | — | — |
| A134 | −4.8 | −8.8 | −7.8 | −5.4 | — | — |
| A45 | −4.5 | — | −8.3 | — | — | −5.1 |
| A139 | −4.4 | −7.7 | −7.2 | −4.8 | — | — |
| A114 | −4.4 | −4.2 | −3.0 | — | — | — |
| A112 | −4.7 | −5.3 | −3.9 | — | — | — |
| A46 | −3.9 | −8.8 | −8.9 | −7.4 | −7.2 | — |
| A54 | −5.1 | −9.3 | −10.2 | — | — | — |
| A78 | −4.0 | −5.9 | −5.0 | −4.4 | — | — |
| A111 | −3.4 | −5.8 | −4.9 | −3.9 | — | — |
| A6 | −5.8 | — | −5.3 | — | — | −3.7 |
| A68 | −3.7 | −4.9 | −4.9 | — | −4.4 | −4.1 |
| A107 | −2.9 | −3.2 | −2.9 | −2.7 | — | — |
| A94 | −4.6 | −6.8 | −5.4 | — | — | — |
| A70 | −2.4 | −3.1 | −3.7 | — | −3.5 | — |
| A103 | −2.8 | −1.6 | −0.9 | — | — | — |
| A147 | −4.5 | −6.3 | −6.8 | −6.4 | −5.1 | — |
| A149 | −1.8 | −1.6 | −1.4 | −1.0 | — | — |
| A68 | −2.5 | — | −3.3 | −2.3 | — | −2.4 |

“—” not measured;
Bold P < 0.05 vs. vehicle

### Example 12: Weight-Loss Efficacy of Long Acting GLP-1 Receptor Agonist Polypeptides in LE DIO Rats

[1116] Weight loss efficacy studies were conducted in a rodent model for obesity Long Evans (LE) diet-induced obese (DIO) rat to investigate the efficacy and durability of the long acting GLP-1 receptor agonist polypeptides after bolus subcutaneous (SC) dosing. Male LE DIO rats were used (Envigo Laboratories, Inc., Indianapolis, IN) and beginning at weaning, the rats were fed a high fat chow (Teklad TD 95217, 40% kcal from fat, Harlan Laboratories, Madison, WI). Rats were 15-17 weeks old at the start of the study. The rats were housed 1 per cage and given ad libitum access to high fat diet (Harlan TD.95217, 4.3 kcal/g) and water, maintained on a 12 hr light/dark cycle from 5:00 AM to 5:00 PM at 21° C. and 50% relative humidity and allowed to acclimate for at least 10 days prior to use. Male LE DIO rats at 18 weeks of age (14 weeks on high fat diet) were dosed by bolus SC injection of the long acting GLP-1 receptor agonist polypeptides (30 mcg/kg; n=6 animals/treatment group). All other procedures were the same as described for previous example. The mean weight loss (%) from baseline and vehicle control (ΔΔ %) results are shown in Table 17.

TABLE 17
The mean weight loss (%) from
baseline and vehicle control (ΔΔ %)

| | DIO Weight Loss (30 mcg/kg SC bolus) | | | | | |
|---|---|---|---|---|---|---|
| Compound | % Weight change from Vehicle | | | | | |
| # | 1 d | 2 d | 3 d | 4 d | 5 d | 6 d |
| A120 | −0.4 | −3.7 | −5.9 | −6.0 | −4.9 | −4.6 |
| A132 | −0.7 | −2.5 | −4.5 | −3.7 | −2.0 | −1.6 |
| A115 | −0.6 | −2.7 | −4.4 | −3.2 | −1.9 | −1.4 |
| A55 | −0.6 | −3.4 | −6.0 | −6.5 | −4.9 | −4.2 |
| A135 | — | −3.7 | −4.8 | −4.3 | — | — |
| A137 | — | −3.0 | −2.9 | −2.7 | — | — |
| A134 | −0.6 | −3.1 | −5.6 | −5.1 | −4.1 | −3.5 |
| A54 | −0.6 | −3.4 | −6.0 | −6.3 | −4.7 | −3.8 |

“—” not measured;
Bold P < 0.05 vs. vehicle

### Example 13: Efficacy of Long Acting GLP-1 Receptor Agonist Polypeptides on Food Intake in LE DIO Rats

[1117] Food intake was measured on the same LE DIO rats used for measuring body weights in Example 13 to investigate the efficacy and durability of the long acting GLP-1 receptor agonist polypeptides on food intake inhibition after bolus SC dosing (30 mcg/kg). Food hopper weights were measured daily. All other procedures were the same as described for the previous example. The results of mean reduction in food intake (%) from vehicle control (ΔΔ %) are shown in Table 18.

TABLE 18
The results of mean reduction in food intake
(%) from vehicle control (ΔΔ %)

| | DIO Food Intake (30 mcg/kg; SC bolus) | | | | |
|---|---|---|---|---|---|
| Compound | % Food Intake Inhibition from Vehicle | | | | |
| # | 1 d | 2 d | 3 d | 4 d | 5d |
| A120 | −71.4 | −91.2 | −24.6 | −5.5 | 7.1 |
| A132 | −54.9 | −70.6 | −4.2 | 12.7 | −1.0 |
| A115 | −65.9 | −60.8 | 0.0 | 12.7 | 19.4 |
| A55 | −68.1 | −71.6 | −20.3 | 13.6 | 29.6 |
| A134 | −76.9 | −69.6 | −1.7 | 20.9 | 23.5 |
| A54 | −70.3 | −59.8 | −19.5 | 16.4 | 33.7 |

Bold = P < 0.05 vs. vehicle

### Example 14: Chronic Weight Loss Efficacy of Long Acting GLP-1 Receptor Agonist Polypeptides in LE DIO Rats

[1118] Chronic studies were conducted to determine the effects and durability of continuous administration of long acting GLP-1 receptor agonist polypeptides on body weight after 27 days of treatment in the LE DIO rat. Male LE DIO rats at 18 weeks of age (14 weeks on high fat diet) were treated the same as described for Example 13. The rats were weighed and fat and non-fat mass body composition measurements were made using quantitative magnetic resonance (QMR) (Echo Medical Systems, Houston, TX) per manufacturer's protocol before the start of drug treatment (Day −9) and on day 27. Body weights were measured throughout the study. The rats were randomized into treatment groups (n=8/group) with similar mean body weights and fat mass. The LE DIO rats were dosed by SC injection every other day (eod) with either long acting GLP-1 receptor agonist polypeptides or vehicle (saline). All other procedures were the same as described for the previous example. The mean weight loss (%) from baseline and vehicle control (ΔΔ %) results are shown in FIG. 1 and Table 19.

### Example 15: Chronic Anti-Diabetic Efficacy of Long Acting GLP-1 Receptor Agonist Polypeptides in ZDF Rats

[1119] Chronic studies were conducted to determine the antidiabetic effects of continuous administration of long acting GLP-1 receptor agonist polypeptides on HbA1c (a primary anti-diabetic parameter) after 27 days of treatment in Zucker Diabetic Fatty (ZDF) rats. Male ZDF rats were obtained at six (6) weeks of age (Charles River, Raleigh, NC) and used on study at eight (8) weeks old. Upon receipt, the rats were housed one animal per cage with free access to Purina 5008 chow (Lab Diet, St. Louis, MO) and water, maintained on a 12-hour light/dark cycle from 5:00 AM to 5:00 PM at 21° C. and 50% relative humidity and allowed to acclimate for nine (9) days before the start of the study. Blood samples were taken as pre-bleeds (Day −3) via tail vein to measure glucose levels and HbA1c. The ZDF rats were randomized into treatment groups (n=9-10/group) with similar mean HbA1c and glucose. Long acting GLP-1 receptor agonist polypeptides were dosed every other day (eod) by SC injection. Blood samples were taken again on Days 14 and 27 (end of study) to measure glucose levels and HbA1c. Final whole blood samples were collected by cardiac puncture under isoflurane anesthesia (Day 27). HbA1c analysis was performed by using a Carolina Chemistries CLC720i Clinical Chemistry analyzer (Mindray Inc., Mahwah, NY) with the protocol and method parameters as described by the manufacturer. HbA1c results expressed as the mean % change from baseline and vehicle control (ΔΔ %) are shown in Table 19.

TABLE 19
Summary of weight loss and HbA1c changes in
rats treated with long acting GLP-1
receptor agonist polypeptides

| | DIO Dose Response | | ZDF Dose Response | |
|---|---|---|---|---|
| | 27 day weight loss | | 27 day HbA1c (%) | |
| Compound | ΔΔ % | ED₅₀ | ΔΔ % | ED₅₀ |
| # | weight loss* | (mcg/kg/d) | HbA1c* | (mcg/kg/d) |
| A120 | 14 | 14 | 2.7 | 7.4 |
| A115 | 15 | 17 | 2.8 | 8.2 |
| A55 | 10 | 4 | — | — |
| A45 | 16 | 11 | 1.8 | 7.2 |

“—” = not determined;
Bold = P < 0.05 vs. vehicle;
*% at the ED₅₀

### Example 16: Comparative Weight Loss & Antidiabetic Potencies of GLP-1 Receptor Agonist Polypeptides in ZDF Rats

[1120] GLP-1 receptor agonist polypeptides can be administered to patients, in one embodiment, via an implantable drug delivery device. The Medici Drug Delivery System™ (Intarcia Therapeutics, Boston, MA) comprises an osmotic drug delivery mini-pump (illustrated in FIG. 3) for subdermal placement in a patient to provide subcutaneous delivery of a drug at a continuous rate for extended periods of time, such as 3, 6, 12, 18, or 24 months, etc. The osmotic drug delivery mini-pump of FIG. 3 is 44 mm long and 4 mm in diameter. It includes a drug reservoir having a constrained volume. As such, high in vivo potency is necessary for a drug to be amenable for delivery via this mini-pump.

[1121] In vivo potencies for weight loss and type 2 diabetes in DIO rats were tested for a representative long-acting GLP-1 receptor agonist of the present invention (A120) and compared against potencies for semaglutide (Novo Nordisk A/S Ba d, Denmark). Comparative in vivo potencies for weight loss in DIO rats are shown in FIG. 2A for both compounds (% baseline vs vehicle over 28 days, n=6/dose). Comparative in vivo potencies for type 2 diabetes (i.e., HbA1c lowering) in DIO rats are shown in FIG. 2B for both compounds (A-HbA1c vs vehicle over 28 days, n=9/dose). Antidiabetic potencies were compared against a ZDF rat model for type 2 diabetes.

[1122] Compound A120 was found to be about 2.3 times more potent than semaglutide for weight loss, and about 2.6 times more potent than semaglutide for HbA1c lowering. When adjusted for cognate pharmacokinetic parameters, human potency for compound A120 is projected to be about 3.1 times that of semaglutide.

### Example 17: In Vitro Metabolic Stability Pharmacokinetics Studies (T½) of GLP-1 Receptor Agonists

### Rat and Human Kidney Brush Border Membranes

[1123] In vitro incubations in kidney brush border membrane (kBBM) preparations were used to characterize the ability of peptides to resist degradation by proteases and peptidases in the systemic circulation. kBBM were selected because they contain a high concentration of a diverse set of proteases and peptidases, many of which are present throughout the body. Generally, peptides with low in vivo CL are stable in this assay, while peptides with high in vivo CL are unstable in this assay.

[1124] Brush border membranes from rat and human kidney tissue were prepared via centrifugation and stored at −70° C. Thawed stocks of rat or human kBBM were diluted to the appropriate concentration in 25 mM HEPES buffer (pH 7.4) containing 1% casein and aliquoted into a 96-well plate. The kBBM solutions were pre-warmed for 10 minutes at 37° C. Reactions were initiated by the addition of test peptide (1 mcM final concentration) also dissolved in 25 mM HEPES buffer (pH 7.4) containing 1% casein. The final concentration of kBBM in each incubation was 50 mcg protein/mL. Reactions were maintained at 37° C. in a shaking water bath. At 0, 0.25, 0.5, 1.0, 2.0, and 4.0 h post-initiation, 30 mcL of the reaction mixture was removed and placed into a 96-well plate containing 120 mcL of ice-cold methanol containing 2.5% formic acid. Quenched samples were centrifuged at 2178×g for 10 min and then a portion of the supernatants were transferred to a clean 96-well plate and diluted 1:1 with water. Samples were analyzed by UPLC-MS/MS. The results of this analysis for compound A120 (SEQ ID NO: 120) are shown in Table 20.

### Human Subcutaneous Tissue Homogenates

[1125] In vitro incubations in subcutaneous (SC) tissue homogenates were used to characterize the ability of peptides to resist pre-systemic degradation by proteases and peptidases after SC administration. In vivo nonclinical studies have shown that peptidase activity in the SC space can limit the bioavailability of a peptide after SC administration. Peptides with high SC bioavailability are stable in this assay, while peptides with low SC bioavailability are unstable in this assay.

[1126] Human SC tissue was homogenized in cold 25 mM HEPES buffer (pH 7.4, 10-fold volume based on sample weight), and then filtered through a double layer of cheesecloth. The filtrates were aliquoted, flash frozen on a methanol/dry ice bath and stored at −80° C. The protein concentration of each pooled batch was determined using the BCA protein assay. Thawed stocks of human SC tissue homogenates were diluted to 1.0 mg protein/mL in 25 mM HEPES buffer (pH 7.4) and aliquoted into a 96-well plate. The diluted SC homogenates were pre-warmed for 10 minutes at 37° C. Reactions were initiated by the addition of test peptide (10 mcM final concentration) also dissolved in 25 mM HEPES buffer (pH 7.4). Reactions were maintained at 37° C. in a shaking water bath. At 0, 0.25, 0.5, 1.0, 2.0, and 4.0 h post-initiation, 50 mcL of the reaction mixture was removed and placed into a 96-well plate containing 150 mcL of ice-cold methanol containing 2.5% formic acid. Quenched samples were centrifuged at 2178×g for 10 min and then a portion of the supernatants were transferred to a clean 96-well plate and diluted 1:10 with water. Samples were analyzed by UPLC-MS/MS. The results of this analysis for compound A120 (SEQ ID NO: 120) are shown in Table 20.

### Fraction Unbound (fᵤ) in Plasma

[1127] Conventional methods of measuring plasma protein binding, such as equilibrium dialysis, ultrafiltration and ultracentrifugation, are not reliable with peptides because of their tendency to adsorb to the surface of plastic tubing, dialysis membranes and molecular weight cut-off filters. As a result, the extent to which acylated peptides bind to serum albumin was evaluated using surface plasmon resonance (SPR). The utility of this technique to provide a reasonable estimation of the fraction of a drug bound to plasma protein has been demonstrated in the literature. The results of this analysis for compound A120 (SEQ ID NO: 120) are shown in Table 20. The estimated half life of compound A120 in humans based off this data is approximately 6 days.

TABLE 20
Metabolic stability pharmacokinetics and fraction unbound
of GLP-1 receptor agonist compound A120

| | kBBM | SC tissue stability | |
|---|---|---|---|
| | t1/2(hr) | t1/2(hr) | % fᵤ |
| Rat | >12 | 12 | 0.98% |
| Monkey | >12 | >12 | 0.62% |
| Human | >12 | >12 | 0.78% |

### Example 18: In Vivo Pharmacokinetic Parameters of Compound A120 in Rat and Monkey Models

[1128] Pharmacokinetic profiles of compound A120 in rat and monkey models were determined following intravenous infusion, subcutaneous bolus injection, or subcutaneous infusion of the compound. The results of these analyses are presented in Table 21.

TABLE 21
Pharmacokinetic and ADME profile of compound A120 in rat and monkey models

| | | Dose | CL (mL/ | Vₛₛ | T_{1/2} | AUC_{inf} | Tₘₐₓ | Cₘₐₓ | F |
|---|---|---|---|---|---|---|---|---|---|
| Species | Route | (mg/kg) | min/kg) | (mL/kg) | (hr) | (ng*hr/mL) | (hr) | (ng/mL) | (%) |
| Rat | IV | 0.033 | 0.055 | 56.5 | 15.8 | 10,400 | 1.2 | 969 | — |
| | infusion | | | | | | | | |
| | (n = 3) | | | | | | | | |
| | SC | 0.10 | — | — | 17.8 | 29,400 | 8.0 | 748 | 92.9 |
| | bolus | | | | | | | | |
| | (n = 3) | | | | | | | | |
| Monkey | IV | 0.050 | 0.0074 | 49.8 | 92.9 | 114,000 | 1.0 | 2660 | — |
| | infusion | | | | | | | | |
| | (n = 4) | | | | | | | | |
| | SC | 0.050 | — | — | 116 | 108,000 | 24 | 682 | 94.3 |
| | infusion | | | | | | | | |
| | (n = 2) | | | | | | | | |

“—” = not determined; data shown as mean; median value provided for Tₘₐₓ

### Example 19: Albumin Binding of Long Acting GLP-1 Receptor Agonists

[1129] The potency shifting of conjugated GLP-1 receptor agonists can be seen in Table 22. Data was obtained using a cAMP accumulation assay on the GLP-1 receptor for each of GLP-1 (7-36), semaglutide, exenatide, and compound A120 in the presence of various concentrations of human serum albumin (HSA). The results of this analysis are also presented in FIG. 4.

TABLE 22
pEC₅₀ values of various GLP-1 receptor agonists
in the presence of human serum albumin

| | 0% HSA | 0.1% HSA | 4% HSA |
|---|---|---|---|
| GLP-1 (7-36) | 12.1 | — | — |
| Semaglultide | 11.6 | 10.3 | 9.24 |
| Exenatide | 12.2 | 12.2 | 12.1 |
| Compound A120 | 12.1* | 10.8 | 9.60 |

“—” = not determined;
*significantly different when compared to semaglutide (p < 0.01)

### Example 20: Potency of a Long Acting GLP-1 Receptor Agonist Across Species

[1130] The potencies of GLP-1 (7-36), semaglutide, exenatide, and compound A120 were determined against human (h), cyno (c), and rat (r) orthologs of the GLP-1 receptor (GLP-1R), the glucagon receptor (GCGR), and the gastric inhibitor polypeptide receptor (GIPR). Values were obtained via cAMP accumulation assay. The results of these analyses are presented in Table 23.

TABLE 23
Activity (as pEC₅₀ values) of various GLP-1 receptor agonists against human,
cyno, and rat GLP-1 receptors, glucagon receptors, and gastic inhibitor
polypeptide receptors determined via cAMP accumulation assay

| | hGLP-1R | rGLP-1R | cGLP-1R | hGCGR | rGCGR | cGCGR | hGIPR | rGIPR |
|---|---|---|---|---|---|---|---|---|
| Semaglutide | 11.6 | 11.6 | 11.6 | <9 | <9 | <9 | <9 | <9 |
| Exenatide | 12.2 | 12.0 | 12.1 | — | — | — | — | — |
| Human | 12.1 | 11.9 | 11.9 | — | — | — | — | — |
| GLP-1(7- | | | | | | | | |
| 36) amide | | | | | | | | |
| Compound | 12.1 | 11.8 | 11.8 | <9 | <9 | <9 | <9 | <9 |
| A120 | | | | | | | | |

“—” = not determined

[1131] The data indicate that compound A120 is consistently potent against GLP-1R across three relevant species and that the compound is highly selective for GLP-1R over GCGR and GIPR.

### Example 21: Comparative Data of Compound A120 Against Semaglutide

TABLE 24
Comparison of selected data for compound A120 and semaglutide against desired metrics

| | Human in | | Physicochemical | | | |
|---|---|---|---|---|---|---|
| | vitro potency | | properties | | RatPK | Monkey PK |
| | hGLP-1 | hGCGR | Solubility* | | Cl/% F | Cl/% F |
| | (pEC₅₀) | (pEC₅₀) | (mg/mL) | Stability** | (Cl in mL/min/kg) | (Cl in mL/min/kg) |
| Compound | 12.1 | <9 | 101/96 | 85.7% | 0.054/93% | 0.00757/94% |
| A120 | | | | | | |
| Semaglutide | 11.6 | <9 | <0.08/<0.07 | NA | 0.128/80% | 0.00928/66% |
| Desired value | ≥12.0 | <12.0 | >40 | >90% | ≥80% F | ≥80% F |

*solubility = water/saline;
**stability = 30 days @ 37° C. (1 mg/mL);
NA = highly cloudy/unable to assess stability via HPLC

TABLE 25
Comparison of in vivo potency and efficacy data
for compound A120 and semaglutide
against desired metrics

| | % Weight loss* | | % Change HbA1c** | |
|---|---|---|---|---|
| | ED₅₀/EC₅₀ | at 300 | ED₅₀/EC₅₀ | at 300 |
| | (ED₅₀ = mcg/ | mcg/ | (ED₅₀ = mcg/ | mcg/ |
| | kg/day) | kg/day | kg/day) | kg/day |
| | (EC₅₀ = ng/mL) | dose | (EC₅₀ = ng/mL) | dose |
| Compound | 17/1.7 | 27% | 7/0.9 | 5.4% |
| A120 | | | | |
| Semaglutide | 23/3.9 | 24% | 36/6 | 4.8% |
| Desired | <100 | >10% | <100 | ≥2% |
| value | | | | |

*ΔΔ % weight decrease in DIO rat at day 27;
**ΔΔ % change in HbA1c in ZDF rat at day 27

### Other Embodiments

[1132] While the invention has been described in conjunction with the detailed description thereof, the foregoing description is intended to illustrate and not limit the scope of the invention, which is defined by the scope of the appended claims. Other aspects, advantages, and modifications are within the scope of the following claims.

1. A method of treating a neurological disease or disorder in a human subject, comprising administering to the subject in need thereof a pharmaceutical composition comprising an isolated polypeptide, comprising the amino acid sequence: HX₂X₃GTX₆X₇X₈X₉X₁₀SX₁₂X₁₃X₁₄EX₁₆X₁₇X₁₈X₁₉X₂₀X₂₁FIX₂₄WLKX₂₈GGPX₃₂SGAPPPS-(OH/NH₂) (SEQ ID NO: 200) or a pharmaceutically acceptable salt thereof, wherein:
X₂ is A, 2-aminoisobutyric acid (Aib), or G;
X₃ is E or N-methyl Glu;
X₆ is F or Y;
X₇ is S or T;
X₈ is diaminopimelic acid (Dap), E, K, N, N-methyl Ser, Q, S, s, or Y;
X₉ is D or E;
X₁₀ is I, L, N-methyl Leu, or V;
X₁₂ is E, K, Q, or S;
X₁₃ is Aib, E, K, Q, S, W, or Y;
X₁₄ is Y;
X₁₆ is 2,4-diaminobutanoic acid (Dab), Dap, E, K, k, or ornithine (Orn);
X₁₇ is E, K, or Q;
X₁₈ is A, K, S, or Y;
X₁₉ is A, K, or V;
X₂₀ is E, K, or R;
X₂₁ is Aib, E, H, K, L, Q, or Y;
X₂₄ is A, Aib, E, K, Q, S, or Y;
X₂₈ is D, E, K, N, Q, S, or Y; and
X₃₂ is Dap, H, K, R, or S;
wherein when X₁₆ is Dab, Dap, K, or Orn, it is covalently bound to a lipophilic substituent, optionally via a spacer;
wherein when X₁₆ is E, at least one of X₁, X₁₈, X₁₉, X₂₀, or X₂₁ is K and covalently bound to a lipophilic substituent, optionally via a spacer; and
wherein the peptide optionally further comprises a lactam bridge formed via an amide bond between the side chains of K and E at positions X₁₇ and X₂₁; at positions X₂₁ and X₁₇; at positions X₂₁ and X₂₃; at positions X₂₃ and X₂₁; at positions X₂₀ and X₂₄; at positions X₂₄ and X₂; or at positions X₁₂ and X₁₆.

2-4. (canceled)

5. The method of claim 1, wherein the isolated polypeptide comprises the amino acid sequence: HX₂EGTFTX₈DX₁₀SX₁₂QX₁₄EX₁₆X₁₇X₁₈X₁₉X₂₀X₂₁FIX₂₄WLKX₂₈GGPX₃₂SGAPPPS-(OH/NH₂) (SEQ ID NO: 204), or a pharmaceutically acceptable salt thereof, wherein:
X₂ is 2-aminoisobutyric acid (Aib) or G;
X₈ is N or S;
X₁₀ is I, L, or V;
X₁₂ is E, K, or Q;
X₁₄ is Y;
X₁₆ is diaminopimelic acid (Dap) covalently bound to a lipophilic substituent, optionally via a spacer, or K covalently bound to a lipophilic substituent, optionally via a spacer;
X₁₇ is E or K;
X₁₈ is A or Y;
X₁₉ is A or V;
X₂₀ is E, K, or R;
X₂₁ is E, K, L, or Q;
X₂₄ is E, K, or S;
X₂₈ is N or Q; and
X₃₂ is H or S;
wherein the peptide optionally further comprises a lactam bridge formed via an amide bond between the side chains of K and E at positions X₁ and X₂₁; at positions X₂₁ and X₁₇; at positions X₂₀ and X₂₄; or at positions X₂₄ and X₂₀.

6-8. (canceled)

9. The method of claim 1, wherein the isolated polypeptide comprises the amino acid sequence: HAibEGTFTSDX₁₀SKQYEX₁₆EAX₁₉X₂₀X₂₁FIX₂₄WLKNGGPSSGAPPPS-(OH/NH₂) (SEQ ID NO: 208), or a pharmaceutically acceptable salt thereof, wherein:
X₁₀ is L or V;
X₁₆ is K covalently bound to a lipophilic substituent, optionally via a spacer;
X₁₉ is A or V;
X₂₀ is E, K, or R;
X₂₁ is K or Q;
X₂₄ is E, K, or S; and
wherein the peptide optionally further comprises a lactam bridge formed via an amide bond between the side chains of K and E at positions X₂₁ and X₁₇; at positions X₂₀ and X₂₄; or at positions X₂₄ and X₂₀.

10. (canceled)

11. The method of claim 1, wherein if X₁₆ is E, then X₂₁ is K or E.

12. (canceled)

13. The method of claim 1, wherein X₁₆ is K covalently bound to a lipophilic substituent, optionally via a spacer.

14. The method of claim 1, wherein if X₂₄ is S, then X₁₀ is V.

15. The method of claim 1, wherein the peptide further comprises a lactam bridge formed via an amide bond between the side chains of K and E at positions X₂₀ and X₂₄.

16. The method of claim 1, wherein X₂ is Aib.

17-22. (canceled)

23. The method of claim 1, wherein the lipophilic substituent is covalently bound to the isolated polypeptide via a spacer, and wherein the lipophilic substituent and spacer are of Formula II:
—(Y)ₙ—CO—(CH₂)ₘ—Z Formula II
wherein,
Y is selected from the group consisting of γGlu, Asp, Lys and Gly;
Z is —CH₃ or —CO₂H;
m is from 4 to 24; and
n is from 1 to 10.

24-35. (canceled)

36. The method of claim 1, wherein the lipophilic substituent is covalently bound to the isolated polypeptide via a spacer, and wherein the lipophilic substituent and spacer are of Formula IV:
—(Y1)ₙ₁-(dpeg)ᵣ(Y2)ₙ₂—CO—(CH₂)ₘ—Z Formula IV
wherein
Z is —CH₃ or —CO₂H;
m is from 4 to 24;
Y1 is selected from the group consisting of γGlu, Asp, and Gly;
Y2 is selected from the group consisting of γGlu, Asp, and Gly;
dpeg is —[CO(CH₂)O(CH₂)₂O(CH₂)NH]—;
r is from 1 to 8;
n1 is from 0 to 10; and
n2 is from 0 to 10.

37-44. (canceled)

45. A method of treating a neurological disease or disorder in a human subject, comprising administering to the subject in need thereof a pharmaceutical composition comprising an isolated polypeptide comprising the amino acid sequence of any of SEQ ID NOs: 1 to 162, or a pharmaceutically acceptable salt thereof.

46-49. (canceled)

50. A method of treating a neurological disease or disorder in a human subject, comprising administering to the subject in need thereof a pharmaceutical composition comprising an isolated polypeptide comprising an amino acid sequence of any of SEQ ID NOs: 55, 115, 120, and 132, or a pharmaceutically acceptable salt thereof.

51. The method of claim 50, wherein the isolated polypeptide comprises the amino acid sequence of SEQ ID NO: 115, or a pharmaceutically acceptable salt thereof.

52. The method of claim 50, wherein the isolated polypeptide comprises the amino acid sequence of SEQ ID NO: 120, or a pharmaceutically acceptable salt thereof.

53-61. (canceled)

62. The method of claim 1, wherein the neurological disease or disorder is selected from the group consisting of Parkinson's disease and Alzheimer's disease.

63. (canceled)

64. The method of claim 50, wherein the isolated polypeptide comprises the amino acid sequence of SEQ ID NO: 55, or a pharmaceutically acceptable salt thereof.

65. The method of claim 50, wherein the isolated polypeptide comprises the amino acid sequence of SEQ ID NO: 132, or a pharmaceutically acceptable salt thereof.

66. The method of claim 1, wherein the neurological disease or disorder is selected from the group consisting of Parkinson's disease and Alzheimer's disease.

67. The method of claim 1, wherein the neurological disease or disorder is selected from the group consisting of Parkinson's disease and Alzheimer's disease.

The application's sequence listing, which the Patent Office published only in electronic form, follows.

SEQUENCE LISTING (9128 sequences)

SEQ ID NO: 1 - protein, 39 aa, synthetic construct
  REGION 1..39: note = Description of Artificial Sequence: Synthetic polypeptide
  SITE 14: note = K independently represents an L-lysine covalently bound to a lipophilic substituent, optionally via a spacer
HGEGTFTSDLSKQKEEEAVRLFIEWLKNGGPSSGAPPPS

SEQ ID NO: 2 - protein, 39 aa, synthetic construct
  REGION 1..39: note = Description of Artificial Sequence: Synthetic polypeptide
  SITE 17: note = K independently represents an L-lysine covalently bound to a lipophilic substituent, optionally via a spacer
HGEGTFTSDLSKQMEEKAVRLFIEWLKNGGPSSGAPPPS

SEQ ID NO: 3 - protein, 39 aa, synthetic construct
  REGION 1..39: note = Description of Artificial Sequence: Synthetic polypeptide
  SITE 18: note = K independently represents an L-lysine covalently bound to a lipophilic substituent, optionally via a spacer
HGEGTFTSDLSKQMEEEKVRLFIEWLKNGGPSSGAPPPS

SEQ ID NO: 4 - protein, 39 aa, synthetic construct
  REGION 1..39: note = Description of Artificial Sequence: Synthetic polypeptide
  SITE 20: note = K independently represents an L-lysine covalently bound to a lipophilic substituent, optionally via a spacer
HGEGTFTSDLSKQMEEEAVKLFIEWLKNGGPSSGAPPPS

SEQ ID NO: 5 - protein, 39 aa, synthetic construct
  REGION 1..39: note = Description of Artificial Sequence: Synthetic polypeptide
  SITE 21: note = K independently represents an L-lysine covalently bound to a lipophilic substituent, optionally via a spacer
HGEGTFTSDLSKQMEEEAVRKFIEWLKNGGPSSGAPPPS

SEQ ID NO: 6 - protein, 39 aa, synthetic construct
  REGION 1..39: note = Description of Artificial Sequence: Synthetic polypeptide
  SITE 16: note = K independently represents an L-lysine covalently bound to a lipophilic substituent, optionally via a spacer
HGEGTFTSDLSKQMEKEAVRLFIEWLKNGGPSSGAPPPS

SEQ ID NO: 7 - protein, 39 aa, synthetic construct; identical to SEQ ID NO: 6
  REGION 1..39: note = Description of Artificial Sequence: Synthetic polypeptide
  SITE 16: note = K independently represents an L-lysine covalently bound to a lipophilic substituent, optionally via a spacer

SEQ ID NO: 8 - protein, 39 aa, synthetic construct; identical to SEQ ID NO: 6
  REGION 1..39: note = Description of Artificial Sequence: Synthetic polypeptide
  SITE 16: note = K independently represents an L-lysine covalently bound to a lipophilic substituent, optionally via a spacer

SEQ ID NO: 9 - protein, 39 aa, synthetic construct; identical to SEQ ID NO: 6
  REGION 1..39: note = Description of Artificial Sequence: Synthetic polypeptide
  SITE 16: note = K independently represents an L-lysine covalently bound to a lipophilic substituent, optionally via a spacer

SEQ ID NO: 10 - protein, 39 aa, synthetic construct; identical to SEQ ID NO: 6
  REGION 1..39: note = Description of Artificial Sequence: Synthetic polypeptide
  SITE 16: note = K independently represents an L-lysine covalently bound to a lipophilic substituent, optionally via a spacer

SEQ ID NO: 11 - protein, 39 aa, synthetic construct; identical to SEQ ID NO: 6
  REGION 1..39: note = Description of Artificial Sequence: Synthetic polypeptide
  SITE 16: note = K independently represents an L-lysine covalently bound to a lipophilic substituent, optionally via a spacer

SEQ ID NO: 12 - protein, 39 aa, synthetic construct; identical to SEQ ID NO: 6
  REGION 1..39: note = Description of Artificial Sequence: Synthetic polypeptide
  SITE 16: note = D-lysine
  SITE 16: note = D-lysine independently represents a D-lysine covalently bound to a lipophilic substituent, optionally via a spacer

SEQ ID NO: 13 - protein, 39 aa, synthetic construct
  REGION 1..39: note = Description of Artificial Sequence: Synthetic polypeptide
  SITE 16: note = K independently represents an L-lysine covalently bound to a lipophilic substituent, optionally via a spacer
HGEGTFTSDLSKQLEKEAVRLFIEWLKNGGPSSGAPPPS

SEQ ID NO: 14 - protein, 39 aa, synthetic construct
  REGION 1..39: note = Description of Artificial Sequence: Synthetic polypeptide
  SITE 16: note = K independently represents an L-lysine covalently bound to a lipophilic substituent, optionally via a spacer
HGEGTFTSDLSKQFEKEAVRLFIEWLKNGGPSSGAPPPS

SEQ ID NO: 15 - protein, 39 aa, synthetic construct
  REGION 1..39: note = Description of Artificial Sequence: Synthetic polypeptide
  SITE 16: note = K independently represents an L-lysine covalently bound to a lipophilic substituent, optionally via a spacer
HGEGTFTSDLSKQYEKEAVRLFIEWLKNGGPSSGAPPPS

SEQ ID NO: 16 - protein, 39 aa, synthetic construct
  REGION 1..39: note = Description of Artificial Sequence: Synthetic polypeptide
  SITE 16: note = K independently represents an L-lysine covalently bound to a lipophilic substituent, optionally via a spacer
HGEGTFTSDLSKQQEKEAVRLFIEWLKNGGPSSGAPPPS

SEQ ID NO: 17 - protein, 39 aa, synthetic construct
  REGION 1..39: note = Description of Artificial Sequence: Synthetic polypeptide
  SITE 16: note = K independently represents an L-lysine covalently bound to a lipophilic substituent, optionally via a spacer
HGEGTFTSDLSKYMEKEAVRLFIEWLKNGGPSSGAPPPS

SEQ ID NO: 18 - protein, 39 aa, synthetic construct
  REGION 1..39: note = Description of Artificial Sequence: Synthetic polypeptide
  SITE 16: note = K independently represents an L-lysine covalently bound to a lipophilic substituent, optionally via a spacer
HGEGTFTSDLSKEMEKEAVRLFIEWLKNGGPSSGAPPPS

SEQ ID NO: 19 - protein, 39 aa, synthetic construct
  REGION 1..39: note = Description of Artificial Sequence: Synthetic polypeptide
  SITE 16: note = K independently represents an L-lysine covalently bound to a lipophilic substituent, optionally via a spacer
HGEGTFTSDLSKKMEKEAVRLFIEWLKNGGPSSGAPPPS

SEQ ID NO: 20 - protein, 39 aa, synthetic construct
  REGION 1..39: note = Description of Artificial Sequence: Synthetic polypeptide
  SITE 16: note = K independently represents an L-lysine covalently bound to a lipophilic substituent, optionally via a spacer
HGEGTFTSDLSKSMEKEAVRLFIEWLKNGGPSSGAPPPS

SEQ ID NO: 21 - protein, 39 aa, synthetic construct
  REGION 1..39: note = Description of Artificial Sequence: Synthetic polypeptide
  SITE 16: note = K independently represents an L-lysine covalently bound to a lipophilic substituent, optionally via a spacer
HAEGTFTSDLSKQMEKEAVRLFIEWLKNGGPSSGAPPPS

SEQ ID NO: 22 - protein, 39 aa, synthetic construct
  REGION 1..39: note = Description of Artificial Sequence: Synthetic polypeptide
  MOD_RES 2: note = Aib
  SITE 16: note = K independently represents an L-lysine covalently bound to a lipophilic substituent, optionally via a spacer
HXEGTFTSDLSKQMEKEAVRLFIEWLKNGGPSSGAPPPS

SEQ ID NO: 23 - protein, 39 aa, synthetic construct; identical to SEQ ID NO: 21
  REGION 1..39: note = Description of Artificial Sequence: Synthetic polypeptide
  MOD_RES 3: note = N-methyl-E
  SITE 16: note = K independently represents an L-lysine covalently bound to a lipophilic substituent, optionally via a spacer

SEQ ID NO: 24 - protein, 39 aa, synthetic construct; identical to SEQ ID NO: 6
  REGION 1..39: note = Description of Artificial Sequence: Synthetic polypeptide
  SITE 16: note = K independently represents an L-lysine covalently bound to a lipophilic substituent, optionally via a spacer

SEQ ID NO: 25 - protein, 39 aa, synthetic construct; identical to SEQ ID NO: 6
  REGION 1..39: note = Description of Artificial Sequence: Synthetic polypeptide
  SITE 16: note = K independently represents an L-lysine covalently bound to a lipophilic substituent, optionally via a spacer

SEQ ID NO: 26 - protein, 39 aa, synthetic construct; identical to SEQ ID NO: 6
  REGION 1..39: note = Description of Artificial Sequence: Synthetic polypeptide
  SITE 16: note = K independently represents an L-lysine covalently bound to a lipophilic substituent, optionally via a spacer

SEQ ID NO: 27 - protein, 39 aa, synthetic construct
  REGION 1..39: note = Description of Artificial Sequence: Synthetic polypeptide
  SITE 16: note = K independently represents an L-lysine covalently bound to a lipophilic substituent, optionally via a spacer
HGEGTFTSDLSKQYEKEAVRLFIAWLKNGGPSSGAPPPS

SEQ ID NO: 28 - protein, 39 aa, synthetic construct
  REGION 1..39: note = Description of Artificial Sequence: Synthetic polypeptide
  SITE 16: note = K independently represents an L-lysine covalently bound to a lipophilic substituent, optionally via a spacer
HGEGTFTSDLSKQYEKEAVRLFISWLKNGGPSSGAPPPS

SEQ ID NO: 29 - protein, 39 aa, synthetic construct
  REGION 1..39: note = Description of Artificial Sequence: Synthetic polypeptide
  SITE 26: note = K independently represents an L-lysine covalently bound to a lipophilic substituent, optionally via a spacer
HGEGTFTSDLSKQYEKEAVRLFIKWLKNGGPSSGAPPPS

SEQ ID NO: 30 - protein, 39 aa, synthetic construct
  REGION 1..39: note = Description of Artificial Sequence: Synthetic polypeptide
  SITE 16: note = K independently represents an L-lysine covalently bound to a lipophilic substituent, optionally via a spacer
HGEGTFTSDLSKQYEKEAVRLFIQWLKNGGPSSGAPPPS

SEQ ID NO: 31 - protein, 39 aa, synthetic construct
  REGION 1..39: note = Description of Artificial Sequence: Synthetic polypeptide
  SITE 16: note = K independently represents an L-lysine covalently bound to a lipophilic substituent, optionally via a spacer
HGEGTFTSDLSKQYEKEAVRLFIYWLKNGGPSSGAPPPS

SEQ ID NO: 32 - protein, 39 aa, synthetic construct
  REGION 1..39: note = Description of Artificial Sequence: Synthetic polypeptide
  MOD_RES 24: note = Aib
  SITE 16: note = K independently represents an L-lysine covalently bound to a lipophilic substituent, optionally via a spacer
HGEGTFTSDLSKQYEKEAVRLFIXWLKNGGPSSGAPPPS

SEQ ID NO: 33 - protein, 39 aa, synthetic construct; identical to SEQ ID NO: 6
  REGION 1..39: note = Description of Artificial Sequence: Synthetic polypeptide
  SITE 16: note = K independently represents an L-lysine covalently bound to a lipophilic substituent, optionally via a spacer

SEQ ID NO: 34 - protein, 39 aa, synthetic construct; identical to SEQ ID NO: 6
  REGION 1..39: note = Description of Artificial Sequence: Synthetic polypeptide
  SITE 16: note = K independently represents an L-lysine covalently bound to a lipophilic substituent, optionally via a spacer

SEQ ID NO: 35 - protein, 39 aa, synthetic construct; identical to SEQ ID NO: 6
  REGION 1..39: note = Description of Artificial Sequence: Synthetic polypeptide
  SITE 16: note = K independently represents an L-lysine covalently bound to a lipophilic substituent, optionally via a spacer

SEQ ID NO: 36 - protein, 39 aa, synthetic construct; identical to SEQ ID NO: 6
  REGION 1..39: note = Description of Artificial Sequence: Synthetic polypeptide
  SITE 16: note = K independently represents an L-lysine covalently bound to a lipophilic substituent, optionally via a spacer

SEQ ID NO: 37 - protein, 39 aa, synthetic construct; identical to SEQ ID NO: 6
  REGION 1..39: note = Description of Artificial Sequence: Synthetic polypeptide
  SITE 16: note = K independently represents an L-lysine covalently bound to a lipophilic substituent, optionally via a spacer

SEQ ID NO: 38 - protein, 39 aa, synthetic construct; identical to SEQ ID NO: 6
  REGION 1..39: note = Description of Artificial Sequence: Synthetic polypeptide
  SITE 16: note = K independently represents an L-lysine covalently bound to a lipophilic substituent, optionally via a spacer

SEQ ID NO: 39 - protein, 39 aa, synthetic construct
  REGION 1..39: note = Description of Artificial Sequence: Synthetic polypeptide
  SITE 16: note = K independently represents an L-lysine covalently bound to a lipophilic substituent, optionally via a spacer
HGEGTFTSDLSKQYEKEAVREFIEWLKNGGPSSGAPPPS

SEQ ID NO: 40 - protein, 39 aa, synthetic construct
  REGION 1..39: note = Description of Artificial Sequence: Synthetic polypeptide
  SITE 16: note = K independently represents an L-lysine covalently bound to a lipophilic substituent, optionally via a spacer
HGEGTFTSDLSKQYEKEAVRYFIEWLKNGGPSSGAPPPS

SEQ ID NO: 41 - protein, 39 aa, synthetic construct
  REGION 1..39: note = Description of Artificial Sequence: Synthetic polypeptide
  SITE 16: note = K independently represents an L-lysine covalently bound to a lipophilic substituent, optionally via a spacer
HGEGTFTSDLSKQYEKEAVRQFIEWLKNGGPSSGAPPPS

SEQ ID NO: 42 - protein, 39 aa, synthetic construct
  REGION 1..39: note = Description of Artificial Sequence: Synthetic polypeptide
  SITE 16: note = K independently represents an L-lysine covalently bound to a lipophilic substituent, optionally via a spacer
HGEGTFTSDLSKQYEKEAVRKFIEWLKNGGPSSGAPPPS

SEQ ID NO: 43 - protein, 39 aa, synthetic construct
  REGION 1..39: note = Description of Artificial Sequence: Synthetic polypeptide
  MOD_RES 21: note = Aib
  SITE 16: note = K independently represents an L-lysine covalently bound to a lipophilic substituent, optionally via a spacer
HGEGTFTSDLSKQYEKEAVRXFIEWLKNGGPSSGAPPPS

SEQ ID NO: 44 - protein, 39 aa, synthetic construct
  REGION 1..39: note = Description of Artificial Sequence: Synthetic polypeptide
  SITE 16: note = K independently represents an L-lysine covalently bound to a lipophilic substituent, optionally via a spacer
HGEGTFTSDLSKQYEKEAVRHFIEWLKNGGPSSGAPPPS

SEQ ID NO: 45 - protein, 39 aa, synthetic construct
  REGION 1..39: note = Description of Artificial Sequence: Synthetic polypeptide
  MOD_RES 2: note = Aib
  SITE 16: note = K independently represents an L-lysine covalently bound to a lipophilic substituent, optionally via a spacer
HXEGTFTSDLSKQYEKEAVRLFISWLKNGGPSSGAPPPS

SEQ ID NO: 46 - protein, 39 aa, synthetic construct
  REGION 1..39: note = Description of Artificial Sequence: Synthetic polypeptide
  MOD_RES 2: note = Aib
  SITE 16: note = K independently represents an L-lysine covalently bound to a lipophilic substituent, optionally via a spacer
HXEGTFTSDLSKQYEKEAVRLFIEWLKNGGPSSGAPPPS

SEQ ID NO: 47 - protein, 39 aa, synthetic construct
  REGION 1..39: note = Description of Artificial Sequence: Synthetic polypeptide
  SITE 16: note = K independently represents an L-lysine covalently bound to a lipophilic substituent, optionally via a spacer
HGEGTFTSELSKQYEKEAVRLFIEWLKNGGPSSGAPPPS

SEQ ID NO: 48 - protein, 39 aa, synthetic construct
  REGION 1..39: note = Description of Artificial Sequence: Synthetic polypeptide
  SITE 16: note = K independently represents an L-lysine covalently bound to a lipophilic substituent, optionally via a spacer
HGEGTFTSDLSKQYEKEAAKLFISWLKNGGPSSGAPPPS

SEQ ID NO: 49 - protein, 39 aa, synthetic construct
  REGION 1..39: note = Description of Artificial Sequence: Synthetic polypeptide
  SITE 16: note = K independently represents an L-lysine covalently bound to a lipophilic substituent, optionally via a spacer
HGEGTFTSDLSKQYEKEAARLFISWLKNGGPSSGAPPPS

SEQ ID NO: 50 - protein, 39 aa, synthetic construct
  REGION 1..39: note = Description of Artificial Sequence: Synthetic polypeptide
  MOD_RES 32: note = Diaminopimelic acid
  SITE 16: note = K independently represents an L-lysine covalently bound to a lipophilic substituent, optionally via a spacer
HGEGTFTSDLSKQYEKEAVRLFISWLKNGGPXSGAPPPS

SEQ ID NO: 51 - protein, 39 aa, synthetic construct
  REGION 1..39: note = Description of Artificial Sequence: Synthetic polypeptide
  SITE 16: note = K independently represents an L-lysine covalently bound to a lipophilic substituent, optionally via a spacer
HGEGTFTSDLSKQYEKEAVRLFISWLKNGGPKSGAPPPS

SEQ ID NO: 52 - protein, 39 aa, synthetic construct
  REGION 1..39: note = Description of Artificial Sequence: Synthetic polypeptide
  SITE 16: note = K independently represents an L-lysine covalently bound to a lipophilic substituent, optionally via a spacer
HGEGTFTSDLSKQYEKEAVRLFISWLKNGGPHSGAPPPS

SEQ ID NO: 53 - protein, 39 aa, synthetic construct
  REGION 1..39: note = Description of Artificial Sequence: Synthetic polypeptide
  SITE 16: note = K independently represents an L-lysine covalently bound to a lipophilic substituent, optionally via a spacer
HGEGTFTSDLSKQYEKEAVRLFISWLKNGGPRSGAPPPS

SEQ ID NO: 54 - protein, 39 aa, synthetic construct
  REGION 1..39: note = Description of Artificial Sequence: Synthetic polypeptide
  MOD_RES 2: note = Aib
  SITE 16: note = K independently represents an L-lysine covalently bound to a lipophilic substituent, optionally via a spacer
HXEGTFTSDLSKQYEKEAVREFIEWLKNGGPSSGAPPPS

SEQ ID NO: 55 - protein, 39 aa, synthetic construct
  REGION 1..39: note = Description of Artificial Sequence: Synthetic polypeptide
  MOD_RES 2: note = Aib
  SITE 16: note = K independently represents an L-lysine covalently bound to a lipophilic substituent, optionally via a spacer
HXEGTFTSDLSKQYEKEAVRQFIEWLKNGGPSSGAPPPS

SEQ ID NO: 56 - protein, 39 aa, synthetic construct
  REGION 1..39: note = Description of Artificial Sequence: Synthetic polypeptide
  MOD_RES 2: note = Aib
  SITE 16: note = K independently represents an L-lysine covalently bound to a lipophilic substituent, optionally via a spacer
HXEGTFTSDLSKQYEKEAARLFIEWLKNGGPSSGAPPPS

SEQ ID NO: 57 - protein, 39 aa, synthetic construct
  REGION 1..39: note = Description of Artificial Sequence: Synthetic polypeptide
  MOD_RES 2: note = Aib
  SITE 16: note = K independently represents an L-lysine covalently bound to a lipophilic substituent, optionally via a spacer
HXEGTFTSDLSKQYEKEAARLFIEWLKNGGPHSGAPPPS

SEQ ID NO: 58 - protein, 39 aa, synthetic construct
  REGION 1..39: note = Description of Artificial Sequence: Synthetic polypeptide
  MOD_RES 2: note = Aib
  SITE 16: note = K independently represents an L-lysine covalently bound to a lipophilic substituent, optionally via a spacer
HXEGTFTSDLSKQYEKEAVRLFIEWLKDGGPSSGAPPPS

SEQ ID NO: 59 - protein, 39 aa, synthetic construct
  REGION 1..39: note = Description of Artificial Sequence: Synthetic polypeptide
  MOD_RES 2: note = Aib
  SITE 16: note = K independently represents an L-lysine covalently bound to a lipophilic substituent, optionally via a spacer
HXEGTFTSDLSKQYEKEAVRLFIEWLKKGGPSSGAPPPS

SEQ ID NO: 60 - protein, 39 aa, synthetic construct
  REGION 1..39: note = Description of Artificial Sequence: Synthetic polypeptide
  MOD_RES 2: note = Aib
  SITE 16: note = K independently represents an L-lysine covalently bound to a lipophilic substituent, optionally via a spacer
HXEGTFTSDLSKQYEKEAVRLFIEWLKSGGPSSGAPPPS

SEQ ID NO: 61 - protein, 39 aa, synthetic construct
  REGION 1..39: note = Description of Artificial Sequence: Synthetic polypeptide
  MOD_RES 2: note = Aib
  SITE 16: note = K independently represents an L-lysine covalently bound to a lipophilic substituent, optionally via a spacer
HXEGTFTSDLSKQYEKEAAREFISWLKNGGPHSGAPPPS

SEQ ID NO: 62 - protein, 39 aa, synthetic construct
  REGION 1..39: note = Description of Artificial Sequence: Synthetic polypeptide
  MOD_RES 2: note = Aib
  SITE 16: note = K independently represents an L-lysine covalently bound to a lipophilic substituent, optionally via a spacer
HXEGTFTSDLSKQYEKEAARKFISWLKNGGPHSGAPPPS

SEQ ID NO: 63 - protein, 39 aa, synthetic construct
  REGION 1..39: note = Description of Artificial Sequence: Synthetic polypeptide
  MOD_RES 2: note = Aib
  SITE 16: note = K independently represents an L-lysine covalently bound to a lipophilic substituent, optionally via a spacer
HXEGTFTSDLSKQYEKEAARKFIEWLKNGGPHSGAPPPS

SEQ ID NO: 64 - protein, 39 aa, synthetic construct
  REGION 1..39: note = Description of Artificial Sequence: Synthetic polypeptide
  MOD_RES 2: note = Aib
  SITE 16: note = K independently represents an L-lysine covalently bound to a lipophilic substituent, optionally via a spacer
HXEGTFTSDLSKQYEKEAARQFISWLKNGGPHSGAPPPS

SEQ ID NO: 65 - protein, 39 aa, synthetic construct
  REGION 1..39: note = Description of Artificial Sequence: Synthetic polypeptide
  MOD_RES 2: note = Aib
  SITE 16: note = K independently represents an L-lysine covalently bound to a lipophilic substituent, optionally via a spacer
HXEGTFTSDLSKQYEKEAAREFIEWLKNGGPKSGAPPPS

SEQ ID NO: 66 - protein, 39 aa, synthetic construct
  REGION 1..39: note = Description of Artificial Sequence: Synthetic polypeptide
  MOD_RES 2: note = Aib
  MOD_RES 32: note = Diaminopimelic acid
  SITE 16: note = K independently represents an L-lysine covalently bound to a lipophilic substituent, optionally via a spacer
HXEGTFTSDLSKQYEKEAAREFIEWLKNGGPXSGAPPPS

SEQ ID NO: 67 - protein, 39 aa, synthetic construct
  REGION 1..39: note = Description of Artificial Sequence: Synthetic polypeptide
  MOD_RES 2: note = Aib
  SITE 16: note = K independently represents an L-lysine covalently bound to a lipophilic substituent, optionally via a spacer
HXEGTYTSDLSKQYEKEAAREFIEWLKNGGPSSGAPPPS

SEQ ID NO: 68 - protein, 39 aa, synthetic construct
  REGION 1..39: note = Description of Artificial Sequence: Synthetic polypeptide
  MOD_RES 2: note = Aib
  SITE 16: note = K independently represents an L-lysine covalently bound to a lipophilic substituent, optionally via a spacer
HXEGTFTSDLSQQYEKEAAREFIEWLKNGGPSSGAPPPS

SEQ ID NO: 69 - protein, 39 aa, synthetic construct
  REGION 1..39: note = Description of Artificial Sequence: Synthetic polypeptide
  MOD_RES 2: note = Aib
  SITE 16: note = K independently represents an L-lysine covalently bound to a lipophilic substituent, optionally via a spacer
HXEGTFTSDLSSQYEKEAAREFIEWLKNGGPSSGAPPPS

SEQ ID NO: 70 - protein, 39 aa, synthetic construct
  REGION 1..39: note = Description of Artificial Sequence: Synthetic polypeptide
  MOD_RES 2: note = Aib
  SITE 16: note = K independently represents an L-lysine covalently bound to a lipophilic substituent, optionally via a spacer
HXEGTFTSDLSEQYEKEAAREFIEWLKNGGPSSGAPPPS

SEQ ID NO: 71 - protein, 39 aa, synthetic construct
  REGION 1..39: note = Description of Artificial Sequence: Synthetic polypeptide
  MOD_RES 2: note = Aib
  MOD_RES 16: note = Diaminopimelic acid
  SITE 16: note = Diaminopimelic acid independently represents a diaminopimelic acid covalently bound to a lipophilic substituent, optionally via a spacer
HXEGTFTSDLSKQYEXEAAREFIEWLKNGGPSSGAPPPS

SEQ ID NO: 72 - protein, 39 aa, synthetic construct; identical to SEQ ID NO: 71
  REGION 1..39: note = Description of Artificial Sequence: Synthetic polypeptide
  MOD_RES 2: note = Aib
  MOD_RES 16: note = 2,4-diaminobutanoic acid
  SITE 16: note = 2,4-diaminobutanoic acid independently represents a 2,4-diaminobutanoic acid covalently bound to a lipophilic substituent, optionally via a spacer

SEQ ID NO: 73 - protein, 39 aa, synthetic construct; identical to SEQ ID NO: 71
  REGION 1..39: note = Description of Artificial Sequence: Synthetic polypeptide
  MOD_RES 2: note = Aib
  SITE 16: note = Orn
  SITE 16: note = Orn independently represents an Orn covalently bound to a lipophilic substituent, optionally via a spacer

SEQ ID NO: 74 - protein, 39 aa, synthetic construct
  REGION 1..39: note = Description of Artificial Sequence: Synthetic polypeptide
  MOD_RES 2: note = Aib
  SITE 16: note = K independently represents an L-lysine covalently bound to a lipophilic substituent, optionally via a spacer
HXEGTFTSDLSKQYEKKAVRLFISWLKNGGPSSGAPPPS

SEQ ID NO: 75 - protein, 39 aa, synthetic construct
  REGION 1..39: note = Description of Artificial Sequence: Synthetic polypeptide
  MOD_RES 2: note = Aib
  SITE 16: note = K independently represents an L-lysine covalently bound to a lipophilic substituent, optionally via a spacer
HXEGTFTSDLSKQYEKEYVRLFISWLKNGGPSSGAPPPS

SEQ ID NO: 76 - protein, 39 aa, synthetic construct
  REGION 1..39: note = Description of Artificial Sequence: Synthetic polypeptide
  MOD_RES 2: note = Aib
  SITE 16: note = K independently represents an L-lysine covalently bound to a lipophilic substituent, optionally via a spacer
HXEGTFTSDLSKQYEKEAAREFIEWLKNGGPSSGAPPPS

SEQ ID NO: 77 - protein, 39 aa, synthetic construct
  REGION 1..39: note = Description of Artificial Sequence: Synthetic polypeptide
  MOD_RES 2: note = Aib
  SITE 16: note = K independently represents an L-lysine covalently bound to a lipophilic substituent, optionally via a spacer
HXEGTFTSDLSKQYEKEAARKFISWLKNGGPSSGAPPPS

SEQ ID NO: 78 - protein, 39 aa, synthetic construct
  REGION 1..39: note = Description of Artificial Sequence: Synthetic polypeptide
  MOD_RES 2: note = Aib
  SITE 16: note = K independently represents an L-lysine covalently bound to a lipophilic substituent, optionally via a spacer
HXEGTFTSDLSKQYEKEAVREFISWLKNGGPSSGAPPPS

SEQ ID NO: 79 - protein, 39 aa, synthetic construct
  REGION 1..39: note = Description of Artificial Sequence: Synthetic polypeptide
  MOD_RES 2: note = Aib
  SITE 16: note = K independently represents an L-lysine covalently bound to a lipophilic substituent, optionally via a spacer
HXEGTFTSDVSEQYEKEAAREFIEWLKNGGPSSGAPPPS

SEQ ID NO: 80 - protein, 39 aa, synthetic construct
  REGION 1..39: note = Description of Artificial Sequence: Synthetic polypeptide
  MOD_RES 2: note = Aib
  SITE 16: note = K independently represents an L-lysine covalently bound to a lipophilic substituent, optionally via a spacer
HXEGTFTSDISEQYEKEAAREFIEWLKNGGPSSGAPPPS

SEQ ID NO: 81 - protein, 39 aa, synthetic construct
  REGION 1..39: note = Description of Artificial Sequence: Synthetic polypeptide
  MOD_RES 2: note = Aib
  SITE 16: note = K independently represents an L-lysine covalently bound to a lipophilic substituent, optionally via a spacer
HXEGTFTNDLSEQYEKEAAREFIEWLKNGGPSSGAPPPS

SEQ ID NO: 82 - protein, 39 aa, synthetic construct
  REGION 1..39: note = Description of Artificial Sequence: Synthetic polypeptide
  MOD_RES 2: note = Aib
  SITE 16: note = K independently represents an L-lysine covalently bound to a lipophilic substituent, optionally via a spacer
HXEGTFTNDVSEQYEKEAAREFIEWLKNGGPSSGAPPPS

SEQ ID NO: 83 - protein, 39 aa, synthetic construct
  REGION 1..39: note = Description of Artificial Sequence: Synthetic polypeptide
  MOD_RES 2: note = Aib
  SITE 16: note = K independently represents an L-lysine covalently bound to a lipophilic substituent, optionally via a spacer
HXEGTFTNDISEQYEKEAAREFIEWLKNGGPSSGAPPPS

SEQ ID NO: 84 - protein, 39 aa, synthetic construct
  REGION 1..39: note = Description of Artificial Sequence: Synthetic polypeptide
  MOD_RES 2: note = Aib
  SITE 16: note = K independently represents an L-lysine covalently bound to a lipophilic substituent, optionally via a spacer
HXEGTFSSDLSEQYEKEAAREFIEWLKNGGPSSGAPPPS

SEQ ID NO: 85 - protein, 39 aa, synthetic construct
  REGION 1..39: note = Description of Artificial Sequence: Synthetic polypeptide
  MOD_RES 2: note = Aib
  SITE 16: note = K independently represents an L-lysine covalently bound to a lipophilic substituent, optionally via a spacer
HXEGTFTSDVSKQYEKEAARLFISWLKNGGPSSGAPPPS

SEQ ID NO: 86 - protein, 39 aa, synthetic construct
  REGION 1..39: note = Description of Artificial Sequence: Synthetic polypeptide
  MOD_RES 2: note = Aib
  SITE 16: note = K independently represents an L-lysine covalently bound to a lipophilic substituent, optionally via a spacer
HXEGTFTSDISKQYEKEAARLFISWLKNGGPSSGAPPPS

SEQ ID NO: 87 - protein, 39 aa, synthetic construct
  REGION 1..39: note = Description of Artificial Sequence: Synthetic polypeptide
  MOD_RES 2: note = Aib
  SITE 16: note = K independently represents an L-lysine covalently bound to a lipophilic substituent, optionally via a spacer
HXEGTFTNDLSKQYEKEAARLFISWLKNGGPSSGAPPPS

SEQ ID NO: 88 - protein, 39 aa, synthetic construct
  REGION 1..39: note = Description of Artificial Sequence: Synthetic polypeptide
  MOD_RES 2: note = Aib
  SITE 16: note = K independently represents an L-lysine covalently bound to a lipophilic substituent, optionally via a spacer
HXEGTFTNDVSKQYEKEAARLFISWLKNGGPSSGAPPPS

SEQ ID NO: 89 - protein, 39 aa, synthetic construct
  REGION 1..39: note = Description of Artificial Sequence: Synthetic polypeptide
  MOD_RES 2: note = Aib
  SITE 16: note = K independently represents an L-lysine covalently bound to a lipophilic substituent, optionally via a spacer
HXEGTFTNDISKQYEKEAARLFISWLKNGGPSSGAPPPS

SEQ ID NO: 90 - protein, 39 aa, synthetic construct
  REGION 1..39: note = Description of Artificial Sequence: Synthetic polypeptide
  MOD_RES 2: note = Aib
  SITE 16: note = K independently represents an L-lysine covalently bound to a lipophilic substituent, optionally via a spacer
HXEGTFTSDLSKQYEKKAVREFISWLKNGGPSSGAPPPS

SEQ ID NO: 91 - protein, 39 aa, synthetic construct
  REGION 1..39: note = Description of Artificial Sequence: Synthetic polypeptide
  MOD_RES 2: note = Aib
  SITE 16: note = K independently represents an L-lysine covalently bound to a lipophilic substituent, optionally via a spacer
HXEGTFTSDLSKQYEKKAARLFISWLKNGGPSSGAPPPS

SEQ ID NO: 92 - protein, 39 aa, synthetic construct
  REGION 1..39: note = Description of Artificial Sequence: Synthetic polypeptide
  MOD_RES 2: note = Aib
  SITE 16: note = K independently represents an L-lysine covalently bound to a lipophilic substituent, optionally via a spacer
HXEGTFTSDLSKQYEKKYVRLFISWLKNGGPSSGAPPPS

SEQ ID NO: 93 - protein, 39 aa, synthetic construct
  REGION 1..39: note = Description of Artificial Sequence: Synthetic polypeptide
  MOD_RES 2: note = Aib
  SITE 16: note = K independently represents an L-lysine covalently bound to a lipophilic substituent, optionally via a spacer
HXEGTFTSDLSKQYEKKYARLFISWLKNGGPSSGAPPPS

SEQ ID NO: 94 - protein, 39 aa, synthetic construct
  REGION 1..39: note = Description of Artificial Sequence: Synthetic polypeptide
  MOD_RES 2: note = Aib
  SITE 16: note = K independently represents an L-lysine covalently bound to a lipophilic substituent, optionally via a spacer
HXEGTFTSDLSKQYEKKYAREFISWLKNGGPSSGAPPPS

SEQ ID NO: 95 - protein, 39 aa, synthetic construct
  REGION 1..39: note = Description of Artificial Sequence: Synthetic polypeptide
  MOD_RES 2: note = Aib
  SITE 16: note = K independently represents an L-lysine covalently bound to a lipophilic substituent, optionally via a spacer
HXEGTFTSDLSKQYEKKYAEEFISWLKNGGPSSGAPPPS

SEQ ID NO: 96 - protein, 39 aa, synthetic construct
  REGION 1..39: note = Description of Artificial Sequence: Synthetic polypeptide
  MOD_RES 2: note = Aib
  SITE 16: note = K independently represents an L-lysine covalently bound to a lipophilic substituent, optionally via a spacer
HXEGTFTSDLSKQYEKEAVRQFISWLKNGGPSSGAPPPS

SEQ ID NO: 97 - protein, 39 aa, synthetic construct
  REGION 1..39: note = Description of Artificial Sequence: Synthetic polypeptide
  MOD_RES 2: note = Aib
  SITE 16: note = K independently represents an L-lysine covalently bound to a lipophilic substituent, optionally via a spacer
HXEGTFTSDLSKQYEKEYAREFISWLKNGGPSSGAPPPS

SEQ ID NO: 98 - protein, 39 aa, synthetic construct
  REGION 1..39: note = Description of Artificial Sequence: Synthetic polypeptide
  MOD_RES 2: note = Aib
  SITE 16: note = K independently represents an L-lysine covalently bound to a lipophilic substituent, optionally via a spacer
HXEGTFTSDLSKQYEKKAAREFISWLKNGGPSSGAPPPS

SEQ ID NO: 99 - protein, 39 aa, synthetic construct
  REGION 1..39: note = Description of Artificial Sequence: Synthetic polypeptide
  MOD_RES 2: note = Aib
  SITE 16: note = K independently represents an L-lysine covalently bound to a lipophilic substituent, optionally via a spacer
HXEGTFTSDLSKQYEKKSAREFISWLKNGGPSSGAPPPS

SEQ ID NO: 100 - protein, 39 aa, synthetic construct
  REGION 1..39: note = Description of Artificial Sequence: Synthetic polypeptide
  MOD_RES 2: note = Aib
  SITE 16: note = K independently represents an L-lysine covalently bound to a lipophilic substituent, optionally via a spacer
HXEGTFTSDLSKQYEKQAAREFISWLKNGGPSSGAPPPS

SEQ ID NO: 101 - protein, 39 aa, synthetic construct
  REGION 1..39: note = Description of Artificial Sequence: Synthetic polypeptide
  MOD_RES 2: note = Aib
  SITE 16: note = K independently represents an L-lysine covalently bound to a lipophilic substituent, optionally via a spacer
HXEGTFTSDLSKQYEKQYAREFISWLKNGGPSSGAPPPS

SEQ ID NO: 102 - protein, 39 aa, synthetic construct
  REGION 1..39: note = Description of Artificial Sequence: Synthetic polypeptide
  MOD_RES 2: note = Aib
  SITE 16: note = K independently represents an L-lysine covalently bound to a lipophilic substituent, optionally via a spacer
HXEGTFTSDLSKQYEKQSAREFISWLKNGGPSSGAPPPS

SEQ ID NO: 103 - protein, 39 aa, synthetic construct
  REGION 1..39: note = Description of Artificial Sequence: Synthetic polypeptide
  MOD_RES 2: note = Aib
  SITE 16: note = K independently represents an L-lysine covalently bound to a lipophilic substituent, optionally via a spacer
HXEGTFTNDVSKQYEKEAAREFISWLKNGGPSSGAPPPS

SEQ ID NO: 104 - protein, 39 aa, synthetic construct
  REGION 1..39: note = Description of Artificial Sequence: Synthetic polypeptide
  MOD_RES 2: note = Aib
  SITE 16: note = K independently represents an L-lysine covalently bound to a lipophilic substituent, optionally via a spacer
HXEGTFTNDVSKQYEKEAVREFISWLKNGGPSSGAPPPS

SEQ ID NO: 105 - protein, 39 aa, synthetic construct
  REGION 1..39: note = Description of Artificial Sequence: Synthetic polypeptide
  MOD_RES 2: note = Aib
  SITE 16: note = K independently represents an L-lysine covalently bound to a lipophilic substituent, optionally via a spacer
HXEGTFTSDISKQYEKEAVRQFIEWLKNGGPSSGAPPPS

SEQ ID NO: 106 - protein, 39 aa, synthetic construct
  REGION 1..39: note = Description of Artificial Sequence: Synthetic polypeptide
  MOD_RES 2: note = Aib
  SITE 16: note = K independently represents an L-lysine covalently bound to a lipophilic substituent, optionally via a spacer
HXEGTFTSDISKQYEKEAARQFIEWLKNGGPSSGAPPPS

SEQ ID NO: 107 - protein, 39 aa, synthetic construct
  REGION 1..39: note = Description of Artificial Sequence: Synthetic polypeptide
  MOD_RES 2: note = Aib
  SITE 16: note = K independently represents an L-lysine covalently bound to a lipophilic substituent, optionally via a spacer
HXEGTFTNDISKQYEKEAAREFISWLKNGGPSSGAPPPS

SEQ ID NO: 108 - protein, 39 aa, synthetic construct
  REGION 1..39: note = Description of Artificial Sequence: Synthetic polypeptide
  MOD_RES 2: note = Aib
  SITE 16: note = K independently represents an L-lysine covalently bound to a lipophilic substituent, optionally via a spacer
HXEGTFTNDISKQYEKEAVREFISWLKNGGPSSGAPPPS

SEQ ID NO: 109 - protein, 39 aa, synthetic construct
  REGION 1..39: note = Description of Artificial Sequence: Synthetic polypeptide
  MOD_RES 2: note = Aib
  SITE 16: note = K independently represents an L-lysine covalently bound to a lipophilic substituent, optionally via a spacer
HXEGTFTNDISKQYEKEAVRQFIEWLKNGGPSSGAPPPS

SEQ ID NO: 110 - protein, 39 aa, synthetic construct
  REGION 1..39: note = Description of Artificial Sequence: Synthetic polypeptide
  MOD_RES 2: note = Aib
  SITE 16: note = K independently represents an L-lysine covalently bound to a lipophilic substituent, optionally via a spacer
HXEGTFTNDISKQYEKEAARQFIEWLKNGGPSSGAPPPS

SEQ ID NO: 111 - protein, 39 aa, synthetic construct
  REGION 1..39: note = Description of Artificial Sequence: Synthetic polypeptide
  MOD_RES 2: note = Aib
  SITE 16: note = K independently represents an L-lysine covalently bound to a lipophilic substituent, optionally via a spacer
HXEGTFTSDISKQYEKEAARKFISWLKNGGPSSGAPPPS

SEQ ID NO: 112 - protein, 39 aa, synthetic construct
  REGION 1..39: note = Description of Artificial Sequence: Synthetic polypeptide
  MOD_RES 2: note = Aib
  SITE 16: note = K independently represents an L-lysine covalently bound to a lipophilic substituent, optionally via a spacer
HXEGTFTNDISKQYEKEAARKFISWLKNGGPSSGAPPPS

SEQ ID NO: 113 - protein, 39 aa, synthetic construct
  REGION 1..39: note = Description of Artificial Sequence: Synthetic polypeptide
  MOD_RES 2: note = Aib
  SITE 16: note = K independently represents an L-lysine covalently bound to a lipophilic substituent, optionally via a spacer
HXEGTFTNDLSKQYEKEAARKFISWLKNGGPSSGAPPPS

SEQ ID NO: 114 - protein, 39 aa, synthetic construct
  REGION 1..39: note = Description of Artificial Sequence: Synthetic polypeptide
  MOD_RES 2: note = Aib
  SITE 16: note = K independently represents an L-lysine covalently bound to a lipophilic substituent, optionally via a spacer
HXEGTFTNDVSKQYEKEAARKFISWLKNGGPSSGAPPPS

SEQ ID NO: 115 - protein, 39 aa, synthetic construct
  REGION 1..39: note = Description of Artificial Sequence: Synthetic polypeptide
  MOD_RES 2: note = Aib
  SITE 16: note = K independently represents an L-lysine covalently bound to a lipophilic substituent, optionally via a spacer
HXEGTFTSDVSKQYEKEAARKFISWLKNGGPSSGAPPPS

SEQ ID NO: 116 - protein, 39 aa, synthetic construct
  REGION 1..39: note = Description of Artificial Sequence: Synthetic polypeptide
  MOD_RES 2: note = Aib
  SITE 16: note = K independently represents an L-lysine covalently bound to a lipophilic substituent, optionally via a spacer
HXEGTFTNDISKQYEKEYAREFISWLKNGGPSSGAPPPS

SEQ ID NO: 117 - protein, 39 aa, synthetic construct; identical to SEQ ID NO: 77
  REGION 1..39: note = Description of Artificial Sequence: Synthetic polypeptide
  MOD_RES 2: note = Aib
  SITE 16: note = K independently represents an L-lysine covalently bound to a lipophilic substituent, optionally via a spacer
  MOD_RES 17..21: note = Covalent amide linkage derived from the amino sidechain of K and the carboxy sidechain of E

SEQ ID NO: 118 - protein, 39 aa, synthetic construct; identical to SEQ ID NO: 98
  REGION 1..39: note = Description of Artificial Sequence: Synthetic polypeptide
  MOD_RES 2: note = Aib
  SITE 16: note = K independently represents an L-lysine covalently bound to a lipophilic substituent, optionally via a spacer
  MOD_RES 17..21: note = Covalent amide linkage derived from the amino sidechain of K and the carboxy sidechain of E

SEQ ID NO: 119 - protein, 39 aa, synthetic construct
  REGION 1..39: note = Description of Artificial Sequence: Synthetic polypeptide
  MOD_RES 2: note = Aib
  SITE 16: note = K independently represents an L-lysine covalently bound to a lipophilic substituent, optionally via a spacer
  MOD_RES 21..28: note = Covalent amide linkage derived from the amino sidechain of K and the carboxy sidechain of E
HXEGTFTSDLSKQYEKEAAREFISWLKKGGPSSGAPPPS

SEQ ID NO: 120 - protein, 39 aa, synthetic construct
  REGION 1..39: note = Description of Artificial Sequence: Synthetic polypeptide
  MOD_RES 2: note = Aib
  SITE 16: note = K independently represents an L-lysine covalently bound to a lipophilic substituent, optionally via a spacer
  MOD_RES 21..28: note = Covalent amide linkage derived from the amino sidechain of K and the carboxy sidechain of E
HXEGTFTSDLSKQYEKEAAKKFIEWLKNGGPSSGAPPPS

SEQ ID NO: 121 - protein, 39 aa, synthetic construct
  REGION 1..39: note = Description of Artificial Sequence: Synthetic polypeptide
  MOD_RES 2: note = Aib
  SITE 16: note = K independently represents an L-lysine covalently bound to a lipophilic substituent, optionally via a spacer
  SITE 20..24: note = Covalent amide linkage derived from the amino sidechain of K and the carboxy sidechain of E
HXEGTFTSDLSKQYEKEAAEEFIKWLKNGGPSSGAPPPS

SEQ ID NO: 122 - protein, 39 aa, synthetic construct
  REGION 1..39: note = Description of Artificial Sequence: Synthetic polypeptide
  MOD_RES 2: note = Aib
  SITE 21: note = K independently represents an L-lysine covalently bound to a lipophilic substituent, optionally via a spacer
HXEGTFTSDLSKQMEEEAVRKFISWLKNGGPSSGAPPPS

SEQ ID NO: 123 - protein, 39 aa, synthetic construct
  REGION 1..39: note = Description of Artificial Sequence: Synthetic polypeptide
  MOD_RES 2: note = Aib
  SITE 20: note = K independently represents an L-lysine covalently bound to a lipophilic substituent, optionally via a spacer
HXEGTFTSDLSKQYEEEAVKEFISWLKNGGPSSGAPPPS

SEQ ID NO: 124 - protein, 39 aa, synthetic construct
  REGION 1..39: note = Description of Artificial Sequence: Synthetic polypeptide
  MOD_RES 2: note = Aib
  SITE 20: note = K independently represents an L-lysine covalently bound to a lipophilic substituent, optionally via a spacer
HXEGTFTSDLSKQMEEEAVKEFISWLKNGGPSSGAPPPS

SEQ ID NO: 125 - protein, 39 aa, synthetic construct
  REGION 1..39: note = Description of Artificial Sequence: Synthetic polypeptide
  MOD_RES 2: note = Aib
  SITE 19: note = K independently represents an L-lysine covalently bound to a lipophilic substituent, optionally via a spacer
HXEGTFTSDLSKQMEEEAKREFISWLKNGGPSSGAPPPS

SEQ ID NO: 126 - protein, 39 aa, synthetic construct; identical to SEQ ID NO: 123
  REGION 1..39: note = Description of Artificial Sequence: Synthetic polypeptide
  MOD_RES 2: note = Aib
  SITE 20: note = K independently represents an L-lysine covalently bound to a lipophilic substituent, optionally via a spacer
  SITE 20: note = K independently represents an L-lysine covalently bound to a lipophilic substituent, optionally via a spacer

SEQ ID NO: 127 - protein, 39 aa, synthetic construct
  REGION 1..39: note = Description of Artificial Sequence: Synthetic polypeptide
  MOD_RES 2: note = Aib
  SITE 20: note = K independently represents an L-lysine covalently bound to a lipophilic substituent, optionally via a spacer
HXEGTFTSDLSKQYEEEAAKKFISWLKNGGPSSGAPPPS

SEQ ID NO: 128 - protein, 39 aa, synthetic construct
  REGION 1..39: note = Description of Artificial Sequence: Synthetic polypeptide
  MOD_RES 2: note = Aib
  SITE 20: note = K independently represents an L-lysine covalently bound to a lipophilic substituent, optionally via a spacer
HXEGTFTSDLSKQYEEKYAKEFISWLKNGGPSSGAPPPS

SEQ ID NO: 129 - protein, 39 aa, synthetic construct
  REGION 1..39: note = Description of Artificial Sequence: Synthetic polypeptide
  MOD_RES 2: note = Aib
  SITE 20: note = K independently represents an L-lysine covalently bound to a lipophilic substituent, optionally via a spacer
HXEGTFTSDLSKQYEEKYKKEFISWLKNGGPSSGAPPPS

SEQ ID NO: 130 - protein, 39 aa, synthetic construct
  REGION 1..39: note = Description of Artificial Sequence: Synthetic polypeptide
  MOD_RES 2: note = Aib
  SITE 20: note = K independently represents an L-lysine covalently bound to a lipophilic substituent, optionally via a spacer
HXEGTFTSDLSKQYEEEAVKEFISWLKQGGPSSGAPPPS

SEQ ID NO: 131 - protein, 39 aa, synthetic construct
  REGION 1..39: note = Description of Artificial Sequence: Synthetic polypeptide
  MOD_RES 2: note = Aib
  SITE 20: note = K independently represents an L-lysine covalently bound to a lipophilic substituent, optionally via a spacer
HXEGTFTSDLSKQYEEEAAKKFISWLKQGGPSSGAPPPS

SEQ ID NO: 132 - protein, 39 aa, synthetic construct
  REGION 1..39: note = Description of Artificial Sequence: Synthetic polypeptide
  MOD_RES 2: note = Aib
  SITE 16: note = K independently represents an L-lysine covalently bound to a lipophilic substituent, optionally via a spacer
HXEGTFTSDVSKQYEKEAVRKFISWLKNGGPSSGAPPPS

SEQ ID NO: 133 - protein, 39 aa, synthetic construct
  REGION 1..39: note = Description of Artificial Sequence: Synthetic polypeptide
  MOD_RES 2: note = Aib
  SITE 16: note = K independently represents an L-lysine covalently bound to a lipophilic substituent, optionally via a spacer
HXEGTFTSDISKQYEKEAVREFISWLKNGGPSSGAPPPS

SEQ ID NO: 134 - protein, 39 aa, synthetic construct
  REGION 1..39: note = Description of Artificial Sequence: Synthetic polypeptide
  MOD_RES 2: note = Aib
  SITE 16: note = K independently represents an L-lysine covalently bound to a lipophilic substituent, optionally via a spacer
HXEGTFTSDISKQYEKEAVRKFISWLKNGGPSSGAPPPS

SEQ ID NO: 135 - protein, 39 aa, synthetic construct
  REGION 1..39: note = Description of Artificial Sequence: Synthetic polypeptide
  MOD_RES 2: note = Aib
  SITE 16: note = K independently represents an L-lysine covalently bound to a lipophilic substituent, optionally via a spacer
  MOD_RES 20..24: note = Covalent amide linkage derived from the amino sidechain of K and the carboxy sidechain of E
HXEGTFTSDVSKQYEKEAVKKFIEWLKNGGPSSGAPPPS

SEQ ID NO: 136 - protein, 39 aa, synthetic construct
  REGION 1..39: note = Description of Artificial Sequence: Synthetic polypeptide
  MOD_RES 2: note = Aib
  SITE 16: note = K independently represents an L-lysine covalently bound to a lipophilic substituent, optionally via a spacer
  SITE 20..24: note = Covalent amide linkage derived from the amino sidechain of K and the carboxy sidechain of E
HXEGTFTSDISKQYEKEAVKEFIEWLKNGGPSSGAPPPS

SEQ ID NO: 137 - protein, 39 aa, synthetic construct
  REGION 1..39: note = Description of Artificial Sequence: Synthetic polypeptide
  MOD_RES 2: note = Aib
  SITE 16: note = K independently represents an L-lysine covalently bound to a lipophilic substituent, optionally via a spacer
  MOD_RES 20..24: note = Covalent amide linkage derived from the amino sidechain of K and the carboxy sidechain of E
HXEGTFTSDVSKQYEKEAAKKFIEWLKNGGPSSGAPPPS

SEQ ID NO: 138 - protein, 39 aa, synthetic construct
  REGION 1..39: note = Description of Artificial Sequence: Synthetic polypeptide
  MOD_RES 2: note = Aib
  SITE 16: note = K independently represents an L-lysine covalently bound to a lipophilic substituent, optionally via a spacer
  MOD_RES 20..24: note = Covalent amide linkage derived from the amino sidechain of K and the carboxy sidechain of E
HXEGTFTSDVSKQYEKEAAKKFIEWLKQGGPSSGAPPPS

SEQ ID NO: 139 - protein, 39 aa, synthetic construct
  REGION 1..39: note = Description of Artificial Sequence: Synthetic polypeptide
  MOD_RES 2: note = Aib
  SITE 16: note = K independently represents an L-lysine covalently bound to a lipophilic substituent, optionally via a spacer
HXEGTFTSDVSKQYEKEAARKFISWLKQGGPSSGAPPPS

SEQ ID NO: 140 - protein, 39 aa, synthetic construct
  REGION 1..39: note = Description of Artificial Sequence: Synthetic polypeptide
  MOD_RES 2: note = Aib
  SITE 16: note = K independently represents an L-lysine covalently bound to a lipophilic substituent, optionally via a spacer
  MOD_RES 20..24: note = Covalent amide linkage derived from the amino sidechain of K and the carboxy sidechain of E
HXEGTFTSDVSKQYEKEAVKKFIEWLKQGGPSSGAPPPS

SEQ ID NO: 141 - protein, 39 aa, synthetic construct
  REGION 1..39: note = Description of Artificial Sequence: Synthetic polypeptide
  MOD_RES 2: note = Aib
  SITE 16: note = K independently represents an L-lysine covalently bound to a lipophilic substituent, optionally via a spacer
  MOD_RES 17..21: note = Covalent amide linkage derived from the amino sidechain of K and the carboxy sidechain of E
HXEGTFTSDVSKQYEKKAAREFISWLKNGGPSSGAPPPS

SEQ ID NO: 142 - protein, 39 aa, synthetic construct
  REGION 1..39: note = Description of Artificial Sequence: Synthetic polypeptide
  MOD_RES 2: note = Aib
  SITE 16: note = K independently represents an L-lysine covalently bound to a lipophilic substituent, optionally via a spacer
HXEGTFTSDLSKQYEKEAVRKFIEWLKNGGPSSGAPPPS

SEQ ID NO: 143 - protein, 39 aa, synthetic construct; identical to SEQ ID NO: 46
  REGION 1..39: note = Description of Artificial Sequence: Synthetic polypeptide
  MOD_RES 2: note = Aib
  SITE 16: note = K independently represents an L-lysine covalently bound to a lipophilic substituent, optionally via a spacer

SEQ ID NO: 144 - protein, 39 aa, synthetic construct; identical to SEQ ID NO: 28
  REGION 1..39: note = Description of Artificial Sequence: Synthetic polypeptide
  SITE 16: note = K independently represents an L-lysine covalently bound to a lipophilic substituent, optionally via a spacer

SEQ ID NO: 145 - protein, 39 aa, synthetic construct
  REGION 1..39: note = Description of Artificial Sequence: Synthetic polypeptide
  MOD_RES 2: note = Aib
  SITE 16: note = K independently represents an L-lysine covalently bound to a lipophilic substituent, optionally via a spacer
HXEGTFTSDLSKQYEKEAVRLFIEWLKNGGPHSGAPPPS

SEQ ID NO: 146 - protein, 39 aa, synthetic construct; identical to SEQ ID NO: 56
  REGION 1..39: note = Description of Artificial Sequence: Synthetic polypeptide
  MOD_RES 2: note = Aib
  SITE 16: note = K independently represents an L-lysine covalently bound to a lipophilic substituent, optionally via a spacer

SEQ ID NO: 147 - protein, 39 aa, synthetic construct; identical to SEQ ID NO: 76
  REGION 1..39: note = Description of Artificial Sequence: Synthetic polypeptide
  MOD_RES 2: note = Aib
  SITE 16: note = K independently represents an L-lysine covalently bound to a lipophilic substituent, optionally via a spacer

SEQ ID NO: 148 - protein, 39 aa, synthetic construct
  REGION 1..39: note = Description of Artificial Sequence: Synthetic polypeptide
  MOD_RES 2: note = Aib
  SITE 16: note = K independently represents an L-lysine covalently bound to a lipophilic substituent, optionally via a spacer
HXEGTFTSDLSKQYEKEAARKFIEWLKNGGPSSGAPPPS

SEQ ID NO: 149 - protein, 39 aa, synthetic construct; identical to SEQ ID NO: 57
  REGION 1..39: note = Description of Artificial Sequence: Synthetic polypeptide
  MOD_RES 2: note = Aib
  SITE 16: note = K independently represents an L-lysine covalently bound to a lipophilic substituent, optionally via a spacer

SEQ ID NO: 150 - protein, 39 aa, synthetic construct; identical to SEQ ID NO: 63
  REGION 1..39: note = Description of Artificial Sequence: Synthetic polypeptide
  MOD_RES 2: note = Aib
  SITE 16: note = K independently represents an L-lysine covalently bound to a lipophilic substituent, optionally via a spacer

SEQ ID NO: 151 - protein, 39 aa, synthetic construct
  REGION 1..39: note = Description of Artificial Sequence: Synthetic polypeptide
  MOD_RES 2: note = Aib
  SITE 16: note = K independently represents an L-lysine covalently bound to a lipophilic substituent, optionally via a spacer
HXEGTFTSDLSKQYEKEAVRKFIEWLKNGGPHSGAPPPS

SEQ ID NO: 152 - protein, 39 aa, synthetic construct
  REGION 1..39: note = Description of Artificial Sequence: Synthetic polypeptide
  MOD_RES 2: note = Aib
  SITE 16: note = K independently represents an L-lysine covalently bound to a lipophilic substituent, optionally via a spacer
HXEGTFTSDLSKQYEKEAVREFIEWLKNGGPHSGAPPPS

SEQ ID NO: 153 - protein, 39 aa, synthetic construct
  REGION 1..39: note = Description of Artificial Sequence: Synthetic polypeptide
  MOD_RES 2: note = Aib
  SITE 16: note = K independently represents an L-lysine covalently bound to a lipophilic substituent, optionally via a spacer
HXEGTFTSDLSKQYEKEAVRQFIEWLKNGGPHSGAPPPS

SEQ ID NO: 154 - protein, 39 aa, synthetic construct
  REGION 1..39: note = Description of Artificial Sequence: Synthetic polypeptide
  MOD_RES 2: note = Aib
  SITE 16: note = K independently represents an L-lysine covalently bound to a lipophilic substituent, optionally via a spacer
HXEGTFTSDLSKQYEKEAAREFIEWLKNGGPHSGAPPPS

SEQ ID NO: 155 - protein, 39 aa, synthetic construct
  REGION 1..39: note = Description of Artificial Sequence: Synthetic polypeptide
  MOD_RES 2: note = Aib
  SITE 16: note = K independently represents an L-lysine covalently bound to a lipophilic substituent, optionally via a spacer
HXEGTFTSDLSKQYEKEAARQFIEWLKNGGPHSGAPPPS

SEQ ID NO: 156 - protein, 39 aa, synthetic construct
  REGION 1..39: note = Description of Artificial Sequence: Synthetic polypeptide
  MOD_RES 2: note = Aib
  SITE 16: note = K independently represents an L-lysine covalently bound to a lipophilic substituent, optionally via a spacer
HXEGTFTSDLSKQYEKEAVRLFISWLKNGGPHSGAPPPS

SEQ ID NO: 157 - protein, 39 aa, synthetic construct
  REGION 1..39: note = Description of Artificial Sequence: Synthetic polypeptide
  MOD_RES 2: note = Aib
  SITE 16: note = K independently represents an L-lysine covalently bound to a lipophilic substituent, optionally via a spacer
HXEGTFTSDLSKQYEKEAAREFISWLKNGGPSSGAPPPS

SEQ ID NO: 158 - protein, 39 aa, synthetic construct
  REGION 1..39: note = Description of Artificial Sequence: Synthetic polypeptide
  MOD_RES 2: note = Aib
  SITE 16: note = K independently represents an L-lysine covalently bound to a lipophilic substituent, optionally via a spacer
HXEGTFTSDLSKQYEKEAVRKFISWLKNGGPSSGAPPPS

SEQ ID NO: 159 - protein, 39 aa, synthetic construct
  REGION 1..39: note = Description of Artificial Sequence: Synthetic polypeptide
  MOD_RES 2: note = Aib
  MOD_RES 16: note = Diaminopimelic acid
  SITE 16: note = Diaminopimelic acid independently represents a diaminopimelic acid covalently bound to a lipophilic substituent, optionally via a spacer
HXEGTFTSDLSEQYEXEAAREFIEWLKNGGPSSGAPPPS

SEQ ID NO: 160 - protein, 39 aa, synthetic construct
  REGION 1..39: note = Description of Artificial Sequence: Synthetic polypeptide
  MOD_RES 2: note = Aib
  MOD_RES 16: note = Diaminopimelic acid
  SITE 16: note = Diaminopimelic acid independently represents a diaminopimelic acid covalently bound to a lipophilic substituent, optionally via a spacer
HXEGTFTSDLSEQYEXEAARLFIEWLKNGGPSSGAPPPS

SEQ ID NO: 161 - protein, 39 aa, synthetic construct
  REGION 1..39: note = Description of Artificial Sequence: Synthetic polypeptide
  MOD_RES 2: note = Aib
  SITE 16: note = K independently represents an L-lysine covalently bound to a lipophilic substituent, optionally via a spacer
HXEGTFTSDLSEQYEKEAARLFIEWLKNGGPSSGAPPPS

SEQ ID NO: 162 - protein, 39 aa, synthetic construct
  REGION 1..39: note = Description of Artificial Sequence: Synthetic polypeptide
  MOD_RES 2: note = Aib
  SITE 16: note = K independently represents an L-lysine covalently bound to a lipophilic substituent, optionally via a spacer
HXEGTFTEDLSKQYEKEAVRLFISWLKNGGPSSGAPPPS

SEQ ID NO: 163-199 - skipped (37 entries)

SEQ ID NO: 200 - protein, 39 aa, synthetic construct
  REGION 1..39: note = Description of Artificial Sequence: Synthetic polypeptide
  MOD_RES 2: note = Aib
  MOD_RES 3: note = N-methyl-E
  VARIANT 7: note = X can be S or T
  MOD_RES 8: note = Diaminopimelic acid or N-methyl-S
  VARIANT 9: note = X can be D or E
  MOD_RES 10: note = N-methyl-L
  VARIANT 12: note = X can be E, K, Q or S
  MOD_RES 13: note = Aib
  MOD_RES 16: note = 2,4-diaminobutanoic acid  or Diaminopimelic acid
  VARIANT 17: note = X can be E, K or Q
  VARIANT 18: note = X can be A, K, S or Y
  VARIANT 19: note = X can be A, K or V
  VARIANT 20: note = X can be E, K or R
  MOD_RES 21: note = Aib
  MOD_RES 24: note = Aib
  VARIANT 28: note = X can be D, E, K, N, Q, S or Y
  REGION 1..39: note = See specification as filed for detailed description of substitutions and preferred embodiments
  VARIANT 2: note = X can be A, Aib or G
  VARIANT 3: note = X can be E or N-methyl-E
  VARIANT 8: note = X can be Diaminopimelic acid , E, K, N, N-methyl-S, Q, S, D-serine or Y
  VARIANT 10: note = X can be I, L, N-methyl-L or V
  VARIANT 13: note = X can be Aib, E, K, Q, S, W or Y
  VARIANT 16: note = X can be 2,4-diaminobutanoic acid, Diaminopimelic acid, E, K, D-lysine or Orn
  SITE 16: note = D-lysine or Orn
  VARIANT 21: note = X can be Aib, E, H, K, L, Q or Y
  VARIANT 24: note = X can be A, Aib, E, K, Q, S or Y
  MOD_RES 32: note = Diaminopimelic acid
  SITE 8: note = D-serine
  VARIANT 32: note = X can be Diaminopimelic acid, H, K, R or S
  VARIANT 6: note = X can be F or Y
  VARIANT 14: note = X can be E, R, I, K, L, M, Q or Y
HXXGTXXXXXSXXXEXXXXXXFIXWLKXGGPXSGAPPPS

SEQ ID NO: 201 - protein, 39 aa, synthetic construct
  REGION 1..39: note = Description of Artificial Sequence: Synthetic polypeptide
  MOD_RES 2: note = Aib
  MOD_RES 3: note = N-methyl-E
  VARIANT 7: note = X can be S or T
  MOD_RES 8: note = Diaminopimelic acid or N-methyl-S
  MOD_RES 10: note = N-methyl-L
  MOD_RES 13: note = Aib
  VARIANT 20: note = X can be E, K or R
  MOD_RES 21: note = Aib
  MOD_RES 24: note = Aib
  VARIANT 28: note = X can be D, E, K, N, Q, S or Y
  MOD_RES 32: note = Diaminopimelic acid
  REGION 1..39: note = See specification as filed for detailed description of substitutions and preferred embodiments
  VARIANT 2: note = X can be A, Aib or G
  VARIANT 3: note = X can be E or N-methyl-E
  VARIANT 8: note = X can be Diaminopimelic acid , E, K, N, N-methyl-S, Q, S, D-serine or Y
  SITE 8: note = D-serine
  VARIANT 10: note = X can be I, L, N-methyl-L or V
  VARIANT 13: note = X can be Aib, E, K, Q, S, W or Y
  VARIANT 17: note = X can be E, K or Q
  VARIANT 18: note = X can be A, K, S or Y
  VARIANT 19: note = X can be A, K or V
  VARIANT 21: note = X can be Aib, E, H, K, L, Q or Y
  VARIANT 24: note = X can be A, Aib, E, K, Q, S or Y
  VARIANT 32: note = X can be Diaminopimelic acid,H, K, R or S
  VARIANT 6: note = X can be F or Y
  VARIANT 9: note = X can be D or E
  VARIANT 12: note = X can be E, K, Q or S
  SITE 16: note = K covalently bound to a lipophilic substituent, optionally via a spacer
HXXGTXXXXXSXXYEXXXXXXFIXWLKXGGPXSGAPPPS

SEQ ID NO: 202 - protein, 39 aa, synthetic construct
  REGION 1..39: note = Description of Artificial Sequence: Synthetic polypeptide
  MOD_RES 2: note = Aib
  VARIANT 8: note = X can be N or S
  VARIANT 9: note = X can be D or E
  VARIANT 10: note = X can be I, L or V
  VARIANT 12: note = X can be E or K
  VARIANT 14: note = X can be M or Y
  MOD_RES 16: note = Diaminopimelic acid
  VARIANT 17: note = X can be E or K
  VARIANT 18: note = X can be A or Y
  VARIANT 19: note = X can be A or V
  VARIANT 21: note = X can be E, K, L or Q
  VARIANT 24: note = X can be E, K or S
  VARIANT 28: note = X can be E, K, N or Q
  VARIANT 32: note = X can be H or S
  REGION 1..39: note = See specification as filed for detailed description of substitutions and preferred embodiments
  VARIANT 2: note = X can be Aib or G
  VARIANT 16: note = X can be Diaminopimelic acid, E or K
  VARIANT 20: note = X can be E, K or R
  SITE 16: note = Diaminopimelic acid or K are covalently bound to a lipophilic substituent, optionally via a spacer
HXEGTFTXXXSXQXEXXXXXXFIXWLKXGGPXSGAPPPS

SEQ ID NO: 203 - protein, 39 aa, synthetic construct
  REGION 1..39: note = Description of Artificial Sequence: Synthetic polypeptide
  MOD_RES 2: note = Aib
  VARIANT 8: note = X can be N or S
  SITE 16: note = K covalently bound to a lipophilic substituent, optionally via a spacer
  REGION 1..39: note = See specification as filed for detailed description of substitutions and preferred embodiments
  VARIANT 2: note = X can be Aib or G
  VARIANT 9: note = X can be D or E
  VARIANT 10: note = X can be I, L or V
  VARIANT 12: note = X can be E or K
  VARIANT 17: note = X can be E or K
  VARIANT 18: note = X can be A or Y
  VARIANT 19: note = X can be A or V
  VARIANT 20: note = X can be E, K or R
  VARIANT 21: note = X can be E, K, L or Q
  VARIANT 24: note = X can be E, K or S
  VARIANT 28: note = X can be E, K, N or Q
  VARIANT 32: note = X can be  H or S
HXEGTFTXXXSXQYEXXXXXXFIXWLKXGGPXSGAPPPS

SEQ ID NO: 204 - protein, 39 aa, synthetic construct
  REGION 1..39: note = Description of Artificial Sequence: Synthetic polypeptide
  MOD_RES 2: note = Aib
  MOD_RES 16: note = Diaminopimelic acid
  REGION 1..39: note = See specification as filed for detailed description of substitutions and preferred embodiments
  VARIANT 2: note = X can be Aib or G
  VARIANT 8: note = X can be N or S
  VARIANT 10: note = X can be I, L or V
  VARIANT 12: note = X can be E, K or Q
  VARIANT 14: note = X can be M or Y
  VARIANT 16: note = X can be Diaminopimelic acid  or K
  SITE 16: note = Diaminopimelic acid or K are covalently bound to a lipophilic substituent, optionally via a spacer
  VARIANT 17: note = X can be E or K
  VARIANT 18: note = X can be A or Y
  VARIANT 19: note = X can be A or V
  VARIANT 20: note = X can be E, K or R
  VARIANT 21: note = X can be E, K, L or Q
  VARIANT 24: note = X can be E, K or S
  VARIANT 28: note = X can be N or Q
  VARIANT 32: note = X can be H or S
HXEGTFTXDXSXQXEXXXXXXFIXWLKXGGPXSGAPPPS

SEQ ID NO: 205 - protein, 39 aa, synthetic construct
  REGION 1..39: note = Description of Artificial Sequence: Synthetic polypeptide
  MOD_RES 2: note = Aib
  REGION 1..39: note = See specification as filed for detailed description of substitutions and preferred embodiments
  VARIANT 2: note = X can be Aib or G
  VARIANT 8: note = X can be N or S
  VARIANT 10: note = X can be I, L or V
  VARIANT 12: note = X can be E, K or Q
  SITE 16: note = K covalently bound to a lipophilic substituent, optionally via a spacer
  VARIANT 17: note = X can be E or K
  VARIANT 18: note = X can be A or Y
  VARIANT 19: note = X can be A or V
  VARIANT 20: note = X can be E, K or R
  VARIANT 21: note = X can be E, K, L or Q
  VARIANT 24: note = X can be E, K or S
  VARIANT 28: note = X can be N or Q
  VARIANT 32: note = X can be H or S
HXEGTFTXDXSXQYEXXXXXXFIXWLKXGGPXSGAPPPS

SEQ ID NO: 206 - protein, 39 aa, synthetic construct
  REGION 1..39: note = Description of Artificial Sequence: Synthetic polypeptide
  MOD_RES 2: note = Aib
  REGION 1..39: note = See specification as filed for detailed description of substitutions and preferred embodiments
  VARIANT 2: note = Aib or G
  VARIANT 8: note = X can be N or S
  VARIANT 10: note = X can be I, L or V
  VARIANT 14: note = X can be M or Y
  SITE 16: note = K covalently bound to a lipophilic substituent, optionally via a spacer
  VARIANT 19: note = X can be A or V
  VARIANT 20: note = X can be E, K or R
  VARIANT 21: note = X can be E, K, L or Q
  VARIANT 24: note = X can be E, K or S
  VARIANT 28: note = X can be N or Q
HXEGTFTXDXSKQXEXEAXXXFIXWLKXGGPSSGAPPPS

SEQ ID NO: 207 - protein, 39 aa, synthetic construct
  REGION 1..39: note = Description of Artificial Sequence: Synthetic polypeptide
  MOD_RES 2: note = Aib
  REGION 1..39: note = See specification as filed for detailed description of substitutions and preferred embodiments
  VARIANT 2: note = X can be Aib or G
  VARIANT 8: note = X can be N or S
  VARIANT 10: note = X can be I, L or V
  SITE 16: note = K covalently bound to a lipophilic substituent, optionally via a spacer
  VARIANT 19: note = X can be A or V
  VARIANT 20: note = X can be E, K or R
  VARIANT 21: note = X can be E, K, L or Q
  VARIANT 24: note = X can be E, K or S
  VARIANT 28: note = X can be N or Q
HXEGTFTXDXSKQYEXEAXXXFIXWLKXGGPSSGAPPPS

SEQ ID NO: 208 - protein, 39 aa, synthetic construct
  REGION 1..39: note = Description of Artificial Sequence: Synthetic polypeptide
  MOD_RES 2: note = Aib
  REGION 1..39: note = See specification as filed for detailed description of substitutions and preferred embodiments
  VARIANT 10: note = X can be L or V
  SITE 16: note = K covalently bound to a lipophilic substituent, optionally via a spacer
  VARIANT 19: note = X can be A or V
  VARIANT 20: note = X can be E, K or R
  VARIANT 21: note = X can be K or Q
  VARIANT 24: note = X can be  E, K or S
HXEGTFTSDXSKQYEXEAXXXFIXWLKNGGPSSGAPPPS

SEQ ID NO: 209 - skipped

SEQ ID NO: 210 - protein, 39 aa, synthetic construct; identical to SEQ ID NO: 200
  REGION 1..39: note = Description of Artificial Sequence: Synthetic polypeptide
  MOD_RES 2: note = Aib
  MOD_RES 3: note = N-methyl-E
  MOD_RES 8: note = Diaminopimelic acid or N-methyl-S
  MOD_RES 10: note = N-methyl-L
  MOD_RES 13: note = Aib
  MOD_RES 16: note = 2,4-diaminobutanoic acid or Diaminopimelic acid
  MOD_RES 21: note = Aib
  MOD_RES 24: note = Aib
  MOD_RES 32: note = Diaminopimelic acid
  REGION 1..39: note = See specification as filed for detailed description of substitutions and preferred embodiments
  VARIANT 2: note = X can be A, Aib or G
  VARIANT 3: note = X can be E or N-methyl-E
  VARIANT 6: note = X can be  F or Y
  VARIANT 7: note = X can be S or T
  VARIANT 8: note = X can be Diaminopimelic acid, E, K, N, N-methyl-S, Q, S, D-serine or Y
  SITE 8: note = D-serine
  VARIANT 9: note = X can be D or E
  VARIANT 10: note = X can be I, L, N-methyl-L or V
  VARIANT 12: note = X can be E, K, Q or S
  VARIANT 13: note = X can be Aib, E, K, Q, S, W or Y
  VARIANT 14: note = X can be E, R, I, K, L, M, Q or Y
  VARIANT 16: note = X can be 2,4-diaminobutanoic acid, Diaminopimelic acid, E, K, D-lysine, or Orn
  SITE 16: note = D-lysine or Orn
  VARIANT 17: note = X can be E, K or Q
  VARIANT 18: note = X can be A, K, S or Y
  VARIANT 19: note = X can be A, K or V
  VARIANT 20: note = X can be E, K or R
  VARIANT 21: note = X can be Aib, E, H, K, L, Q or Y
  VARIANT 24: note = X can be A, Aib, E, K, Q, S or Y
  VARIANT 28: note = X can be D, E, K, N, Q, S or Y
  VARIANT 32: note = X can be Diaminopimelic acid, H, K, R or S

SEQ ID NO: 211-299 - skipped (89 entries)

SEQ ID NO: 300 - protein, 39 aa, synthetic construct
  REGION 1..39: note = Description of Artificial Sequence: Synthetic polypeptide
HGEGTFTSDLSKQMEEEAVRLFIEWLKNGGPSSGAPPPS

SEQ ID NO: 301 - protein, 30 aa, synthetic construct
  REGION 1..30: note = Description of Artificial Sequence: Synthetic polypeptide
HAEGTFTSDVSSYLEGQAAKEFIAWLVKGR

SEQ ID NO: 302-399 - skipped (98 entries)

SEQ ID NO: 400 - protein, 39 aa, synthetic construct; identical to SEQ ID NO: 200
  REGION 1..39: note = Description of Artificial Sequence: Synthetic polypeptide
  MOD_RES 2: note = Aib
  MOD_RES 3: note = N-methyl-E
  MOD_RES 8: note = Diaminopimelic acid or N-methyl-S
  MOD_RES 10: note = N-methyl-L
  MOD_RES 13: note = Aib
  MOD_RES 16: note = 2,4-diaminobutanoic acid or Diaminopimelic acid
  MOD_RES 21: note = Aib
  MOD_RES 24: note = Aib
  MOD_RES 32: note = Diaminopimelic acid
  REGION 1..39: note = See specification as filed for detailed description of substitutions and preferred embodiments
  VARIANT 2: note = X can be A, Aib or G
  VARIANT 3: note = X can be E or N-methyl-E
  VARIANT 6: note = X can be F or Y
  VARIANT 7: note = X can be  S or T
  VARIANT 8: note = X can be Diaminopimelic acid, E, K, N, N-methyl-S, Q, S, D-serine or Y
  SITE 8: note = D-serine
  VARIANT 9: note = X can be D or E
  VARIANT 10: note = X can be I, L, N-methyl-L or V
  VARIANT 12: note = X can be E, K, Q, or S
  VARIANT 13: note = X can be Aib, E, K, Q, S, W or Y
  VARIANT 14: note = X can be E, R, I, K, L, M, Q or Y
  VARIANT 16: note = X can be 2,4-diaminobutanoic acid, Diaminopimelic acid, E, K, D-lysine, or Orn
  SITE 16: note = D-lysine or Orn
  VARIANT 17: note = X can be E, K or Q
  VARIANT 18: note = X can be A, K, S or Y
  VARIANT 19: note = X can be A, K, or V
  VARIANT 20: note = X can be E, K or R
  VARIANT 21: note = X can be Aib, E, H, K, L, Q or Y
  VARIANT 24: note = X can be A, Aib, E, K, Q, S or Y
  VARIANT 28: note = X can be D, E, K, N, Q, S or Y
  VARIANT 32: note = X can be Diaminopimelic acid,H, K, R or S

SEQ ID NO: 401-404 - skipped (4 entries)

SEQ ID NO: 405 - protein, 39 aa, synthetic construct
  REGION 1..39: note = Description of Artificial Sequence: Synthetic polypeptide
  MOD_RES 2: note = Aib
  REGION 1..39: note = See specification as filed for detailed description of substitutions and preferred embodiments
  VARIANT 2: note = X can be Aib or G
  VARIANT 8: note = X can be N or S
  VARIANT 10: note = X can be I, L, or V
  VARIANT 12: note = X can be E, K, or Q
  VARIANT 17: note = X can be E or K
  VARIANT 18: note = X can be A or Y
  VARIANT 19: note = X can be  A or V
  VARIANT 20: note = X can be E, K, or R
  VARIANT 21: note = X can be  E, K, L, or Q
  VARIANT 24: note = X can be E, K, or S
  VARIANT 28: note = X can be N or Q
  VARIANT 32: note = X can be H or S
HXEGTFTXDXSXQYEKXXXXXFIXWLKXGGPXSGAPPPS

SEQ ID NO: 406-1000 - skipped (595 entries)

SEQ ID NO: 1001 - protein, 39 aa, synthetic construct; identical to SEQ ID NO: 1
  REGION 1..39: note = Description of Artificial Sequence: Synthetic polypeptide

SEQ ID NO: 1002 - protein, 39 aa, synthetic construct; identical to SEQ ID NO: 2
  REGION 1..39: note = Description of Artificial Sequence: Synthetic polypeptide

SEQ ID NO: 1003 - protein, 39 aa, synthetic construct; identical to SEQ ID NO: 3
  REGION 1..39: note = Description of Artificial Sequence: Synthetic polypeptide

SEQ ID NO: 1004 - protein, 39 aa, synthetic construct; identical to SEQ ID NO: 4
  REGION 1..39: note = Description of Artificial Sequence: Synthetic polypeptide

SEQ ID NO: 1005 - protein, 39 aa, synthetic construct; identical to SEQ ID NO: 5
  REGION 1..39: note = Description of Artificial Sequence: Synthetic polypeptide

SEQ ID NO: 1006 - protein, 39 aa, synthetic construct; identical to SEQ ID NO: 6
  REGION 1..39: note = Description of Artificial Sequence: Synthetic polypeptide

SEQ ID NO: 1007-1012 - skipped (6 entries)

SEQ ID NO: 1013 - protein, 39 aa, synthetic construct; identical to SEQ ID NO: 13
  REGION 1..39: note = Description of Artificial Sequence: Synthetic polypeptide

SEQ ID NO: 1014 - protein, 39 aa, synthetic construct; identical to SEQ ID NO: 14
  REGION 1..39: note = Description of Artificial Sequence: Synthetic polypeptide

SEQ ID NO: 1015 - protein, 39 aa, synthetic construct; identical to SEQ ID NO: 15
  REGION 1..39: note = Description of Artificial Sequence: Synthetic polypeptide

SEQ ID NO: 1016 - protein, 39 aa, synthetic construct; identical to SEQ ID NO: 16
  REGION 1..39: note = Description of Artificial Sequence: Synthetic polypeptide

SEQ ID NO: 1017 - protein, 39 aa, synthetic construct; identical to SEQ ID NO: 17
  REGION 1..39: note = Description of Artificial Sequence: Synthetic polypeptide

SEQ ID NO: 1018 - protein, 39 aa, synthetic construct; identical to SEQ ID NO: 18
  REGION 1..39: note = Description of Artificial Sequence: Synthetic polypeptide

SEQ ID NO: 1019 - protein, 39 aa, synthetic construct; identical to SEQ ID NO: 19
  REGION 1..39: note = Description of Artificial Sequence: Synthetic polypeptide

SEQ ID NO: 1020 - protein, 39 aa, synthetic construct; identical to SEQ ID NO: 20
  REGION 1..39: note = Description of Artificial Sequence: Synthetic polypeptide

SEQ ID NO: 1021 - skipped

SEQ ID NO: 1022 - protein, 39 aa, synthetic construct; identical to SEQ ID NO: 22
  REGION 1..39: note = Description of Artificial Sequence: Synthetic polypeptide
  MOD_RES 2: note = Aib

SEQ ID NO: 1023 - protein, 39 aa, synthetic construct; identical to SEQ ID NO: 21
  REGION 1..39: note = Description of Artificial Sequence: Synthetic polypeptide
  MOD_RES 3: note = N-methyl-E

SEQ ID NO: 1024 - protein, 39 aa, synthetic construct; identical to SEQ ID NO: 6
  REGION 1..39: note = Description of Artificial Sequence: Synthetic polypeptide

SEQ ID NO: 1025-1026 - skipped (2 entries)

SEQ ID NO: 1027 - protein, 39 aa, synthetic construct; identical to SEQ ID NO: 27
  REGION 1..39: note = Description of Artificial Sequence: Synthetic polypeptide

SEQ ID NO: 1028 - protein, 39 aa, synthetic construct; identical to SEQ ID NO: 28
  REGION 1..39: note = Description of Artificial Sequence: Synthetic polypeptide

SEQ ID NO: 1029 - protein, 39 aa, synthetic construct; identical to SEQ ID NO: 29
  REGION 1..39: note = Description of Artificial Sequence: Synthetic polypeptide

SEQ ID NO: 1030 - protein, 39 aa, synthetic construct; identical to SEQ ID NO: 30
  REGION 1..39: note = Description of Artificial Sequence: Synthetic polypeptide

SEQ ID NO: 1031 - protein, 39 aa, synthetic construct; identical to SEQ ID NO: 31
  REGION 1..39: note = Description of Artificial Sequence: Synthetic polypeptide

SEQ ID NO: 1032 - protein, 39 aa, synthetic construct; identical to SEQ ID NO: 32
  REGION 1..39: note = Description of Artificial Sequence: Synthetic polypeptide
  MOD_RES 24: note = Aib

SEQ ID NO: 1033 - protein, 39 aa, synthetic construct; identical to SEQ ID NO: 6
  REGION 1..39: note = Description of Artificial Sequence: Synthetic polypeptide

SEQ ID NO: 1034-1038 - skipped (5 entries)

SEQ ID NO: 1039 - protein, 39 aa, synthetic construct; identical to SEQ ID NO: 39
  REGION 1..39: note = Description of Artificial Sequence: Synthetic polypeptide

SEQ ID NO: 1040 - protein, 39 aa, synthetic construct; identical to SEQ ID NO: 40
  REGION 1..39: note = Description of Artificial Sequence: Synthetic polypeptide

SEQ ID NO: 1041 - protein, 39 aa, synthetic construct; identical to SEQ ID NO: 41
  REGION 1..39: note = Description of Artificial Sequence: Synthetic polypeptide

SEQ ID NO: 1042 - protein, 39 aa, synthetic construct; identical to SEQ ID NO: 42
  REGION 1..39: note = Description of Artificial Sequence: Synthetic polypeptide

SEQ ID NO: 1043 - protein, 39 aa, synthetic construct; identical to SEQ ID NO: 43
  REGION 1..39: note = Description of Artificial Sequence: Synthetic polypeptide
  MOD_RES 21: note = Aib

SEQ ID NO: 1044 - protein, 39 aa, synthetic construct; identical to SEQ ID NO: 44
  REGION 1..39: note = Description of Artificial Sequence: Synthetic polypeptide

SEQ ID NO: 1045 - protein, 39 aa, synthetic construct; identical to SEQ ID NO: 45
  REGION 1..39: note = Description of Artificial Sequence: Synthetic polypeptide
  MOD_RES 2: note = Aib

SEQ ID NO: 1046 - protein, 39 aa, synthetic construct; identical to SEQ ID NO: 46
  REGION 1..39: note = Description of Artificial Sequence: Synthetic polypeptide
  MOD_RES 2: note = Aib

SEQ ID NO: 1047 - protein, 39 aa, synthetic construct; identical to SEQ ID NO: 47
  REGION 1..39: note = Description of Artificial Sequence: Synthetic polypeptide

SEQ ID NO: 1048 - protein, 39 aa, synthetic construct; identical to SEQ ID NO: 48
  REGION 1..39: note = Description of Artificial Sequence: Synthetic polypeptide

SEQ ID NO: 1049 - protein, 39 aa, synthetic construct; identical to SEQ ID NO: 49
  REGION 1..39: note = Description of Artificial Sequence: Synthetic polypeptide

SEQ ID NO: 1050 - protein, 39 aa, synthetic construct; identical to SEQ ID NO: 50
  REGION 1..39: note = Description of Artificial Sequence: Synthetic polypeptide
  MOD_RES 32: note = Diaminopimelic acid

SEQ ID NO: 1051 - protein, 39 aa, synthetic construct; identical to SEQ ID NO: 51
  REGION 1..39: note = Description of Artificial Sequence: Synthetic polypeptide

SEQ ID NO: 1052 - protein, 39 aa, synthetic construct; identical to SEQ ID NO: 52
  REGION 1..39: note = Description of Artificial Sequence: Synthetic polypeptide

SEQ ID NO: 1053 - protein, 39 aa, synthetic construct; identical to SEQ ID NO: 53
  REGION 1..39: note = Description of Artificial Sequence: Synthetic polypeptide

SEQ ID NO: 1054 - protein, 39 aa, synthetic construct; identical to SEQ ID NO: 54
  REGION 1..39: note = Description of Artificial Sequence: Synthetic polypeptide
  MOD_RES 2: note = Aib

SEQ ID NO: 1055 - protein, 39 aa, synthetic construct; identical to SEQ ID NO: 55
  REGION 1..39: note = Description of Artificial Sequence: Synthetic polypeptide
  MOD_RES 2: note = Aib

SEQ ID NO: 1056 - protein, 39 aa, synthetic construct; identical to SEQ ID NO: 56
  REGION 1..39: note = Description of Artificial Sequence: Synthetic polypeptide
  MOD_RES 2: note = Aib

SEQ ID NO: 1057 - protein, 39 aa, synthetic construct; identical to SEQ ID NO: 57
  REGION 1..39: note = Description of Artificial Sequence: Synthetic polypeptide
  MOD_RES 2: note = Aib

SEQ ID NO: 1058 - protein, 39 aa, synthetic construct; identical to SEQ ID NO: 58
  REGION 1..39: note = Description of Artificial Sequence: Synthetic polypeptide
  MOD_RES 2: note = Aib

SEQ ID NO: 1059 - protein, 39 aa, synthetic construct; identical to SEQ ID NO: 59
  REGION 1..39: note = Description of Artificial Sequence: Synthetic polypeptide
  MOD_RES 2: note = Aib

SEQ ID NO: 1060 - protein, 39 aa, synthetic construct; identical to SEQ ID NO: 60
  REGION 1..39: note = Description of Artificial Sequence: Synthetic polypeptide
  MOD_RES 2: note = Aib

SEQ ID NO: 1061 - protein, 39 aa, synthetic construct; identical to SEQ ID NO: 61
  REGION 1..39: note = Description of Artificial Sequence: Synthetic polypeptide
  MOD_RES 2: note = Aib

SEQ ID NO: 1062 - protein, 39 aa, synthetic construct; identical to SEQ ID NO: 62
  REGION 1..39: note = Description of Artificial Sequence: Synthetic polypeptide
  MOD_RES 2: note = Aib

SEQ ID NO: 1063 - protein, 39 aa, synthetic construct; identical to SEQ ID NO: 63
  REGION 1..39: note = Description of Artificial Sequence: Synthetic polypeptide
  MOD_RES 2: note = Aib

SEQ ID NO: 1064 - protein, 39 aa, synthetic construct; identical to SEQ ID NO: 64
  REGION 1..39: note = Description of Artificial Sequence: Synthetic polypeptide
  MOD_RES 2: note = Aib

SEQ ID NO: 1065 - protein, 39 aa, synthetic construct; identical to SEQ ID NO: 65
  REGION 1..39: note = Description of Artificial Sequence: Synthetic polypeptide
  MOD_RES 2: note = Aib

SEQ ID NO: 1066 - protein, 39 aa, synthetic construct; identical to SEQ ID NO: 66
  REGION 1..39: note = Description of Artificial Sequence: Synthetic polypeptide
  MOD_RES 2: note = Aib
  MOD_RES 32: note = Diaminopimelic acid

SEQ ID NO: 1067 - protein, 39 aa, synthetic construct; identical to SEQ ID NO: 67
  REGION 1..39: note = Description of Artificial Sequence: Synthetic polypeptide
  MOD_RES 2: note = Aib

SEQ ID NO: 1068 - protein, 39 aa, synthetic construct; identical to SEQ ID NO: 68
  REGION 1..39: note = Description of Artificial Sequence: Synthetic polypeptide
  MOD_RES 2: note = Aib

SEQ ID NO: 1069 - protein, 39 aa, synthetic construct; identical to SEQ ID NO: 69
  REGION 1..39: note = Description of Artificial Sequence: Synthetic polypeptide
  MOD_RES 2: note = Aib

SEQ ID NO: 1070 - protein, 39 aa, synthetic construct; identical to SEQ ID NO: 70
  REGION 1..39: note = Description of Artificial Sequence: Synthetic polypeptide
  MOD_RES 2: note = Aib

SEQ ID NO: 1071 - protein, 39 aa, synthetic construct; identical to SEQ ID NO: 71
  REGION 1..39: note = Description of Artificial Sequence: Synthetic polypeptide
  MOD_RES 2: note = Aib
  MOD_RES 16: note = Diaminopimelic acid

SEQ ID NO: 1072 - protein, 39 aa, synthetic construct; identical to SEQ ID NO: 71
  REGION 1..39: note = Description of Artificial Sequence: Synthetic polypeptide
  MOD_RES 2: note = Aib
  MOD_RES 16: note = 2,4-diaminobutanoic acid

SEQ ID NO: 1073 - protein, 39 aa, synthetic construct; identical to SEQ ID NO: 71
  REGION 1..39: note = Description of Artificial Sequence: Synthetic polypeptide
  MOD_RES 2: note = Aib
  SITE 16: note = Orn

SEQ ID NO: 1074 - protein, 39 aa, synthetic construct; identical to SEQ ID NO: 74
  REGION 1..39: note = Description of Artificial Sequence: Synthetic polypeptide
  MOD_RES 2: note = Aib

SEQ ID NO: 1075 - protein, 39 aa, synthetic construct; identical to SEQ ID NO: 75
  REGION 1..39: note = Description of Artificial Sequence: Synthetic polypeptide
  MOD_RES 2: note = Aib

SEQ ID NO: 1076 - protein, 39 aa, synthetic construct; identical to SEQ ID NO: 76
  REGION 1..39: note = Description of Artificial Sequence: Synthetic polypeptide
  MOD_RES 2: note = Aib

SEQ ID NO: 1077 - protein, 39 aa, synthetic construct; identical to SEQ ID NO: 77
  REGION 1..39: note = Description of Artificial Sequence: Synthetic polypeptide
  MOD_RES 2: note = Aib

SEQ ID NO: 1078 - protein, 39 aa, synthetic construct; identical to SEQ ID NO: 78
  REGION 1..39: note = Description of Artificial Sequence: Synthetic polypeptide
  MOD_RES 2: note = Aib

SEQ ID NO: 1079 - protein, 39 aa, synthetic construct; identical to SEQ ID NO: 79
  REGION 1..39: note = Description of Artificial Sequence: Synthetic polypeptide
  MOD_RES 2: note = Aib

SEQ ID NO: 1080 - protein, 39 aa, synthetic construct; identical to SEQ ID NO: 80
  REGION 1..39: note = Description of Artificial Sequence: Synthetic polypeptide
  MOD_RES 2: note = Aib

SEQ ID NO: 1081 - protein, 39 aa, synthetic construct; identical to SEQ ID NO: 81
  REGION 1..39: note = Description of Artificial Sequence: Synthetic polypeptide
  MOD_RES 2: note = Aib

SEQ ID NO: 1082 - protein, 39 aa, synthetic construct; identical to SEQ ID NO: 82
  REGION 1..39: note = Description of Artificial Sequence: Synthetic polypeptide
  MOD_RES 2: note = Aib

SEQ ID NO: 1083 - protein, 39 aa, synthetic construct; identical to SEQ ID NO: 83
  REGION 1..39: note = Description of Artificial Sequence: Synthetic polypeptide
  MOD_RES 2: note = Aib

SEQ ID NO: 1084 - protein, 39 aa, synthetic construct; identical to SEQ ID NO: 84
  REGION 1..39: note = Description of Artificial Sequence: Synthetic polypeptide
  MOD_RES 2: note = Aib

SEQ ID NO: 1085 - protein, 39 aa, synthetic construct; identical to SEQ ID NO: 85
  REGION 1..39: note = Description of Artificial Sequence: Synthetic polypeptide
  MOD_RES 2: note = Aib

SEQ ID NO: 1086 - protein, 39 aa, synthetic construct; identical to SEQ ID NO: 86
  REGION 1..39: note = Description of Artificial Sequence: Synthetic polypeptide
  MOD_RES 2: note = Aib

SEQ ID NO: 1087 - protein, 39 aa, synthetic construct; identical to SEQ ID NO: 87
  REGION 1..39: note = Description of Artificial Sequence: Synthetic polypeptide
  MOD_RES 2: note = Aib

SEQ ID NO: 1088 - protein, 39 aa, synthetic construct; identical to SEQ ID NO: 88
  REGION 1..39: note = Description of Artificial Sequence: Synthetic polypeptide
  MOD_RES 2: note = Aib

SEQ ID NO: 1089 - protein, 39 aa, synthetic construct; identical to SEQ ID NO: 89
  REGION 1..39: note = Description of Artificial Sequence: Synthetic polypeptide
  MOD_RES 2: note = Aib

SEQ ID NO: 1090 - protein, 39 aa, synthetic construct; identical to SEQ ID NO: 90
  REGION 1..39: note = Description of Artificial Sequence: Synthetic polypeptide
  MOD_RES 2: note = Aib

SEQ ID NO: 1091 - protein, 39 aa, synthetic construct; identical to SEQ ID NO: 91
  REGION 1..39: note = Description of Artificial Sequence: Synthetic polypeptide
  MOD_RES 2: note = Aib

SEQ ID NO: 1092 - protein, 39 aa, synthetic construct; identical to SEQ ID NO: 92
  REGION 1..39: note = Description of Artificial Sequence: Synthetic polypeptide
  MOD_RES 2: note = Aib

SEQ ID NO: 1093 - protein, 39 aa, synthetic construct; identical to SEQ ID NO: 93
  REGION 1..39: note = Description of Artificial Sequence: Synthetic polypeptide
  MOD_RES 2: note = Aib

SEQ ID NO: 1094 - protein, 39 aa, synthetic construct; identical to SEQ ID NO: 94
  REGION 1..39: note = Description of Artificial Sequence: Synthetic polypeptide
  MOD_RES 2: note = Aib

SEQ ID NO: 1095 - protein, 39 aa, synthetic construct; identical to SEQ ID NO: 95
  REGION 1..39: note = Description of Artificial Sequence: Synthetic polypeptide
  MOD_RES 2: note = Aib

SEQ ID NO: 1096 - protein, 39 aa, synthetic construct; identical to SEQ ID NO: 96
  REGION 1..39: note = Description of Artificial Sequence: Synthetic polypeptide
  MOD_RES 2: note = Aib

SEQ ID NO: 1097 - protein, 39 aa, synthetic construct; identical to SEQ ID NO: 97
  REGION 1..39: note = Description of Artificial Sequence: Synthetic polypeptide
  MOD_RES 2: note = Aib

SEQ ID NO: 1098 - protein, 39 aa, synthetic construct; identical to SEQ ID NO: 98
  REGION 1..39: note = Description of Artificial Sequence: Synthetic polypeptide
  MOD_RES 2: note = Aib

SEQ ID NO: 1099 - protein, 39 aa, synthetic construct; identical to SEQ ID NO: 99
  REGION 1..39: note = Description of Artificial Sequence: Synthetic polypeptide
  MOD_RES 2: note = Aib

SEQ ID NO: 1100 - protein, 39 aa, synthetic construct; identical to SEQ ID NO: 100
  REGION 1..39: note = Description of Artificial Sequence: Synthetic polypeptide
  MOD_RES 2: note = Aib

SEQ ID NO: 1101 - protein, 39 aa, synthetic construct; identical to SEQ ID NO: 101
  REGION 1..39: note = Description of Artificial Sequence: Synthetic polypeptide
  MOD_RES 2: note = Aib

SEQ ID NO: 1102 - protein, 39 aa, synthetic construct; identical to SEQ ID NO: 102
  REGION 1..39: note = Description of Artificial Sequence: Synthetic polypeptide
  MOD_RES 2: note = Aib

SEQ ID NO: 1103 - protein, 39 aa, synthetic construct; identical to SEQ ID NO: 103
  REGION 1..39: note = Description of Artificial Sequence: Synthetic polypeptide
  MOD_RES 2: note = Aib

SEQ ID NO: 1104 - protein, 39 aa, synthetic construct; identical to SEQ ID NO: 104
  REGION 1..39: note = Description of Artificial Sequence: Synthetic polypeptide
  MOD_RES 2: note = Aib

SEQ ID NO: 1105 - protein, 39 aa, synthetic construct; identical to SEQ ID NO: 105
  REGION 1..39: note = Description of Artificial Sequence: Synthetic polypeptide
  MOD_RES 2: note = Aib

SEQ ID NO: 1106 - protein, 39 aa, synthetic construct; identical to SEQ ID NO: 106
  REGION 1..39: note = Description of Artificial Sequence: Synthetic polypeptide
  MOD_RES 2: note = Aib

SEQ ID NO: 1107 - protein, 39 aa, synthetic construct; identical to SEQ ID NO: 107
  REGION 1..39: note = Description of Artificial Sequence: Synthetic polypeptide
  MOD_RES 2: note = Aib

SEQ ID NO: 1108 - protein, 39 aa, synthetic construct; identical to SEQ ID NO: 108
  REGION 1..39: note = Description of Artificial Sequence: Synthetic polypeptide
  MOD_RES 2: note = Aib

SEQ ID NO: 1109 - protein, 39 aa, synthetic construct; identical to SEQ ID NO: 109
  REGION 1..39: note = Description of Artificial Sequence: Synthetic polypeptide
  MOD_RES 2: note = Aib

SEQ ID NO: 1110 - protein, 39 aa, synthetic construct; identical to SEQ ID NO: 110
  REGION 1..39: note = Description of Artificial Sequence: Synthetic polypeptide
  MOD_RES 2: note = Aib

SEQ ID NO: 1111 - protein, 39 aa, synthetic construct; identical to SEQ ID NO: 111
  REGION 1..39: note = Description of Artificial Sequence: Synthetic polypeptide
  MOD_RES 2: note = Aib

SEQ ID NO: 1112 - protein, 39 aa, synthetic construct; identical to SEQ ID NO: 112
  REGION 1..39: note = Description of Artificial Sequence: Synthetic polypeptide
  MOD_RES 2: note = Aib

SEQ ID NO: 1113 - protein, 39 aa, synthetic construct; identical to SEQ ID NO: 113
  REGION 1..39: note = Description of Artificial Sequence: Synthetic polypeptide
  MOD_RES 2: note = Aib

SEQ ID NO: 1114 - protein, 39 aa, synthetic construct; identical to SEQ ID NO: 114
  REGION 1..39: note = Description of Artificial Sequence: Synthetic polypeptide
  MOD_RES 2: note = Aib

SEQ ID NO: 1115 - protein, 39 aa, synthetic construct; identical to SEQ ID NO: 115
  REGION 1..39: note = Description of Artificial Sequence: Synthetic polypeptide
  MOD_RES 2: note = Aib

SEQ ID NO: 1116 - protein, 39 aa, synthetic construct; identical to SEQ ID NO: 116
  REGION 1..39: note = Description of Artificial Sequence: Synthetic polypeptide
  MOD_RES 2: note = Aib

SEQ ID NO: 1117-1118 - skipped (2 entries)

SEQ ID NO: 1119 - protein, 39 aa, synthetic construct; identical to SEQ ID NO: 119
  REGION 1..39: note = Description of Artificial Sequence: Synthetic polypeptide
  MOD_RES 2: note = Aib

SEQ ID NO: 1120 - protein, 39 aa, synthetic construct; identical to SEQ ID NO: 120
  REGION 1..39: note = Description of Artificial Sequence: Synthetic polypeptide
  MOD_RES 2: note = Aib

SEQ ID NO: 1121 - protein, 39 aa, synthetic construct; identical to SEQ ID NO: 121
  REGION 1..39: note = Description of Artificial Sequence: Synthetic polypeptide
  MOD_RES 2: note = Aib

SEQ ID NO: 1122 - protein, 39 aa, synthetic construct; identical to SEQ ID NO: 122
  REGION 1..39: note = Description of Artificial Sequence: Synthetic polypeptide
  MOD_RES 2: note = Aib

SEQ ID NO: 1123 - protein, 39 aa, synthetic construct; identical to SEQ ID NO: 123
  REGION 1..39: note = Description of Artificial Sequence: Synthetic polypeptide
  MOD_RES 2: note = Aib

SEQ ID NO: 1124 - protein, 39 aa, synthetic construct; identical to SEQ ID NO: 124
  REGION 1..39: note = Description of Artificial Sequence: Synthetic polypeptide
  MOD_RES 2: note = Aib

SEQ ID NO: 1125 - protein, 39 aa, synthetic construct; identical to SEQ ID NO: 125
  REGION 1..39: note = Description of Artificial Sequence: Synthetic polypeptide
  MOD_RES 2: note = Aib

SEQ ID NO: 1126 - skipped

SEQ ID NO: 1127 - protein, 39 aa, synthetic construct; identical to SEQ ID NO: 127
  REGION 1..39: note = Description of Artificial Sequence: Synthetic polypeptide
  MOD_RES 2: note = Aib

SEQ ID NO: 1128 - protein, 39 aa, synthetic construct; identical to SEQ ID NO: 128
  REGION 1..39: note = Description of Artificial Sequence: Synthetic polypeptide
  MOD_RES 2: note = Aib

SEQ ID NO: 1129 - protein, 39 aa, synthetic construct; identical to SEQ ID NO: 129
  REGION 1..39: note = Description of Artificial Sequence: Synthetic polypeptide
  MOD_RES 2: note = Aib

SEQ ID NO: 1130 - protein, 39 aa, synthetic construct; identical to SEQ ID NO: 130
  REGION 1..39: note = Description of Artificial Sequence: Synthetic polypeptide
  MOD_RES 2: note = Aib

SEQ ID NO: 1131 - protein, 39 aa, synthetic construct; identical to SEQ ID NO: 131
  REGION 1..39: note = Description of Artificial Sequence: Synthetic polypeptide
  MOD_RES 2: note = Aib

SEQ ID NO: 1132 - protein, 39 aa, synthetic construct; identical to SEQ ID NO: 132
  REGION 1..39: note = Description of Artificial Sequence: Synthetic polypeptide
  MOD_RES 2: note = Aib

SEQ ID NO: 1133 - protein, 39 aa, synthetic construct; identical to SEQ ID NO: 133
  REGION 1..39: note = Description of Artificial Sequence: Synthetic polypeptide
  MOD_RES 2: note = Aib

SEQ ID NO: 1134 - protein, 39 aa, synthetic construct; identical to SEQ ID NO: 134
  REGION 1..39: note = Description of Artificial Sequence: Synthetic polypeptide
  MOD_RES 2: note = Aib

SEQ ID NO: 1135 - protein, 39 aa, synthetic construct; identical to SEQ ID NO: 135
  REGION 1..39: note = Description of Artificial Sequence: Synthetic polypeptide
  MOD_RES 2: note = Aib

SEQ ID NO: 1136 - protein, 39 aa, synthetic construct; identical to SEQ ID NO: 136
  REGION 1..39: note = Description of Artificial Sequence: Synthetic polypeptide
  MOD_RES 2: note = Aib

SEQ ID NO: 1137 - protein, 39 aa, synthetic construct; identical to SEQ ID NO: 137
  REGION 1..39: note = Description of Artificial Sequence: Synthetic polypeptide
  MOD_RES 2: note = Aib

SEQ ID NO: 1138 - protein, 39 aa, synthetic construct; identical to SEQ ID NO: 138
  REGION 1..39: note = Description of Artificial Sequence: Synthetic polypeptide
  MOD_RES 2: note = Aib

SEQ ID NO: 1139 - protein, 39 aa, synthetic construct; identical to SEQ ID NO: 139
  REGION 1..39: note = Description of Artificial Sequence: Synthetic polypeptide
  MOD_RES 2: note = Aib

SEQ ID NO: 1140 - protein, 39 aa, synthetic construct; identical to SEQ ID NO: 140
  REGION 1..39: note = Description of Artificial Sequence: Synthetic polypeptide
  MOD_RES 2: note = Aib

SEQ ID NO: 1141 - protein, 39 aa, synthetic construct; identical to SEQ ID NO: 141
  REGION 1..39: note = Description of Artificial Sequence: Synthetic polypeptide
  MOD_RES 2: note = Aib

SEQ ID NO: 1142 - protein, 39 aa, synthetic construct; identical to SEQ ID NO: 142
  REGION 1..39: note = Description of Artificial Sequence: Synthetic polypeptide
  MOD_RES 2: note = Aib

SEQ ID NO: 1143-1144 - skipped (2 entries)

SEQ ID NO: 1145 - protein, 39 aa, synthetic construct; identical to SEQ ID NO: 145
  REGION 1..39: note = Description of Artificial Sequence: Synthetic polypeptide
  MOD_RES 2: note = Aib

SEQ ID NO: 1146-1147 - skipped (2 entries)

SEQ ID NO: 1148 - protein, 39 aa, synthetic construct; identical to SEQ ID NO: 148
  REGION 1..39: note = Description of Artificial Sequence: Synthetic polypeptide
  MOD_RES 2: note = Aib

SEQ ID NO: 1149-1150 - skipped (2 entries)

SEQ ID NO: 1151 - protein, 39 aa, synthetic construct; identical to SEQ ID NO: 151
  REGION 1..39: note = Description of Artificial Sequence: Synthetic polypeptide
  MOD_RES 2: note = Aib

SEQ ID NO: 1152 - protein, 39 aa, synthetic construct; identical to SEQ ID NO: 152
  REGION 1..39: note = Description of Artificial Sequence: Synthetic polypeptide
  MOD_RES 2: note = Aib

SEQ ID NO: 1153 - protein, 39 aa, synthetic construct; identical to SEQ ID NO: 153
  REGION 1..39: note = Description of Artificial Sequence: Synthetic polypeptide
  MOD_RES 2: note = Aib

SEQ ID NO: 1154 - protein, 39 aa, synthetic construct; identical to SEQ ID NO: 154
  REGION 1..39: note = Description of Artificial Sequence: Synthetic polypeptide
  MOD_RES 2: note = Aib

SEQ ID NO: 1155 - protein, 39 aa, synthetic construct; identical to SEQ ID NO: 155
  REGION 1..39: note = Description of Artificial Sequence: Synthetic polypeptide
  MOD_RES 2: note = Aib

SEQ ID NO: 1156 - protein, 39 aa, synthetic construct; identical to SEQ ID NO: 156
  REGION 1..39: note = Description of Artificial Sequence: Synthetic polypeptide
  MOD_RES 2: note = Aib

SEQ ID NO: 1157 - protein, 39 aa, synthetic construct; identical to SEQ ID NO: 157
  REGION 1..39: note = Description of Artificial Sequence: Synthetic polypeptide
  MOD_RES 2: note = Aib

SEQ ID NO: 1158 - protein, 39 aa, synthetic construct; identical to SEQ ID NO: 158
  REGION 1..39: note = Description of Artificial Sequence: Synthetic polypeptide
  MOD_RES 2: note = Aib

SEQ ID NO: 1159 - protein, 39 aa, synthetic construct; identical to SEQ ID NO: 159
  REGION 1..39: note = Description of Artificial Sequence: Synthetic polypeptide
  MOD_RES 2: note = Aib
  MOD_RES 16: note = Diaminopimelic acid

SEQ ID NO: 1160 - protein, 39 aa, synthetic construct; identical to SEQ ID NO: 160
  REGION 1..39: note = Description of Artificial Sequence: Synthetic polypeptide
  MOD_RES 2: note = Aib
  MOD_RES 16: note = Diaminopimelic acid

SEQ ID NO: 1161 - protein, 39 aa, synthetic construct; identical to SEQ ID NO: 161
  REGION 1..39: note = Description of Artificial Sequence: Synthetic polypeptide
  MOD_RES 2: note = Aib

SEQ ID NO: 1162 - protein, 39 aa, synthetic construct; identical to SEQ ID NO: 162
  REGION 1..39: note = Description of Artificial Sequence: Synthetic polypeptide
  MOD_RES 2: note = Aib

SEQ ID NO: 1163-2116 - skipped (954 entries)

SEQ ID NO: 2117 - protein, 39 aa, synthetic construct; identical to SEQ ID NO: 77
  REGION 1..39: note = Description of Artificial Sequence: Synthetic polypeptide
  MOD_RES 2: note = Aib
  MOD_RES 17..21: note = Covalent amide linkage derived from the amino sidechain of K and the carboxy sidechain of E

SEQ ID NO: 2118 - protein, 39 aa, synthetic construct; identical to SEQ ID NO: 98
  REGION 1..39: note = Description of Artificial Sequence: Synthetic polypeptide
  MOD_RES 2: note = Aib
  MOD_RES 17..21: note = Covalent amide linkage derived from the amino sidechain of K and the carboxy sidechain of E

SEQ ID NO: 2119 - protein, 39 aa, synthetic construct; identical to SEQ ID NO: 119
  REGION 1..39: note = Description of Artificial Sequence: Synthetic polypeptide
  MOD_RES 2: note = Aib
  MOD_RES 21..28: note = Covalent amide linkage derived from the amino sidechain of K and the carboxy sidechain of E

SEQ ID NO: 2120 - protein, 39 aa, synthetic construct; identical to SEQ ID NO: 120
  REGION 1..39: note = Description of Artificial Sequence: Synthetic polypeptide
  MOD_RES 2: note = Aib
  MOD_RES 20..24: note = Covalent amide linkage derived from the amino sidechain of K and the carboxy sidechain of E

SEQ ID NO: 2121 - protein, 39 aa, synthetic construct; identical to SEQ ID NO: 121
  REGION 1..39: note = Description of Artificial Sequence: Synthetic polypeptide
  MOD_RES 2: note = Aib
  MOD_RES 20..24: note = Covalent amide linkage derived from the amino sidechain of K and the carboxy sidechain of E

SEQ ID NO: 2122-2134 - skipped (13 entries)

SEQ ID NO: 2135 - protein, 39 aa, synthetic construct; identical to SEQ ID NO: 135
  REGION 1..39: note = Description of Artificial Sequence: Synthetic polypeptide
  MOD_RES 2: note = Aib
  MOD_RES 20..24: note = Covalent amide linkage derived from the amino sidechain of K and the carboxy sidechain of E

SEQ ID NO: 2136 - protein, 39 aa, synthetic construct; identical to SEQ ID NO: 136
  REGION 1..39: note = Description of Artificial Sequence: Synthetic polypeptide
  MOD_RES 2: note = Aib
  MOD_RES 20..24: note = Covalent amide linkage derived from the amino sidechain of K and the carboxy sidechain of E

SEQ ID NO: 2137 - protein, 39 aa, synthetic construct; identical to SEQ ID NO: 137
  REGION 1..39: note = Description of Artificial Sequence: Synthetic polypeptide
  MOD_RES 2: note = Aib
  MOD_RES 20..24: note = Covalent amide linkage derived from the amino sidechain of K and the carboxy sidechain of E

SEQ ID NO: 2138 - protein, 39 aa, synthetic construct; identical to SEQ ID NO: 138
  REGION 1..39: note = Description of Artificial Sequence: Synthetic polypeptide
  MOD_RES 2: note = Aib
  MOD_RES 20..24: note = Covalent amide linkage derived from the amino sidechain of K and the carboxy sidechain of E

SEQ ID NO: 2139 - skipped

SEQ ID NO: 2140 - protein, 39 aa, synthetic construct; identical to SEQ ID NO: 140
  REGION 1..39: note = Description of Artificial Sequence: Synthetic polypeptide
  MOD_RES 2: note = Aib
  MOD_RES 20..24: note = Covalent amide linkage derived from the amino sidechain of K and the carboxy sidechain of E

SEQ ID NO: 2141 - protein, 39 aa, synthetic construct; identical to SEQ ID NO: 141
  REGION 1..39: note = Description of Artificial Sequence: Synthetic polypeptide
  MOD_RES 2: note = Aib
  MOD_RES 17..21: note = Covalent amide linkage derived from the amino sidechain of K and the carboxy sidechain of E

SEQ ID NO: 2142-3114 - skipped (973 entries)

SEQ ID NO: 3115 - protein, 39 aa, synthetic construct; identical to SEQ ID NO: 115
  REGION 1..39: note = Description of Artificial Sequence: Synthetic polypeptide
  MOD_RES 2: note = Aib
  SITE 16: note = K independently represents an L-lysine covalently bound to a lipophilic substituent, optionally via a spacer

SEQ ID NO: 3116-3119 - skipped (4 entries)

SEQ ID NO: 3120 - protein, 39 aa, synthetic construct; identical to SEQ ID NO: 120
  REGION 1..39: note = Description of Artificial Sequence: Synthetic polypeptide
  MOD_RES 2: note = Aib
  SITE 16: note = K independently represents an L-lysine covalently bound to a lipophilic substituent, optionally via a spacer
  MOD_RES 20..22: note = Covalent amide linkage derived from the amino sidechain of K and the carboxy sidechain of E

SEQ ID NO: 3121-4114 - skipped (994 entries)

SEQ ID NO: 4115 - protein, 39 aa, synthetic construct; identical to SEQ ID NO: 115
  REGION 1..39: note = Description of Artificial Sequence: Synthetic polypeptide
  MOD_RES 2: note = Aib
  SITE 16: note = K independently represents an L-lysine covalently bound to a lipophilic substituent, optionally via a spacer

SEQ ID NO: 4116-4119 - skipped (4 entries)

SEQ ID NO: 4120 - protein, 39 aa, synthetic construct; identical to SEQ ID NO: 120
  REGION 1..39: note = Description of Artificial Sequence: Synthetic polypeptide
  MOD_RES 2: note = Aib
  SITE 16: note = K independently represents an L-lysine covalently bound to a lipophilic substituent, optionally via a spacer
  MOD_RES 20..24: note = Covalent amide linkage derived from the amino sidechain of K and the carboxy sidechain of E

SEQ ID NO: 4121-5114 - skipped (994 entries)

SEQ ID NO: 5115 - protein, 39 aa, synthetic construct; identical to SEQ ID NO: 115
  REGION 1..39: note = Description of Artificial Sequence: Synthetic polypeptide
  MOD_RES 2: note = Aib
  SITE 16: note = K independently represents an L-lysine covalently bound to a lipophilic substituent, optionally via a spacer

SEQ ID NO: 5116-5119 - skipped (4 entries)

SEQ ID NO: 5120 - protein, 39 aa, synthetic construct; identical to SEQ ID NO: 120
  REGION 1..39: note = Description of Artificial Sequence: Synthetic polypeptide
  MOD_RES 2: note = Aib
  SITE 16: note = K independently represents an L-lysine covalently bound to a lipophilic substituent, optionally via a spacer
  MOD_RES 20..24: note = Covalent amide linkage derived from the amino sidechain of K and the carboxy sidechain of E

SEQ ID NO: 5121-6114 - skipped (994 entries)

SEQ ID NO: 6115 - protein, 39 aa, synthetic construct; identical to SEQ ID NO: 115
  REGION 1..39: note = Description of Artificial Sequence: Synthetic polypeptide
  MOD_RES 2: note = Aib
  MOD_RES 16: note = K(free amine)
  SITE 16: note = K independently represents an L-lysine covalently bound to a lipophilic substituent, optionally via a spacer

SEQ ID NO: 6116-6119 - skipped (4 entries)

SEQ ID NO: 6120 - protein, 39 aa, synthetic construct; identical to SEQ ID NO: 120
  REGION 1..39: note = Description of Artificial Sequence: Synthetic polypeptide
  MOD_RES 2: note = Aib
  MOD_RES 16: note = K(free amine)
  SITE 16: note = K independently represents an L-lysine covalently bound to a lipophilic substituent, optionally via a spacer
  MOD_RES 20..24: note = Covalent amide linkage derived from the amino sidechain of K and the carboxy sidechain of E

SEQ ID NO: 6121-7114 - skipped (994 entries)

SEQ ID NO: 7115 - protein, 39 aa, synthetic construct; identical to SEQ ID NO: 115
  REGION 1..39: note = Description of Artificial Sequence: Synthetic polypeptide
  MOD_RES 2: note = Aib
  MOD_RES 16: note = K(allyloxycarbonyl protecting group)
  SITE 16: note = K independently represents an L-lysine covalently bound to a lipophilic substituent, optionally via a space

SEQ ID NO: 7116-7119 - skipped (4 entries)

SEQ ID NO: 7120 - protein, 39 aa, synthetic construct; identical to SEQ ID NO: 120
  REGION 1..39: note = Description of Artificial Sequence: Synthetic polypeptide
  MOD_RES 2: note = Aib
  MOD_RES 16: note K(1-(4,4-dimethyl-2,6-dioxocyclohex-1-ylidene)-3-methylbuty l protecting group)
  SITE 16: note = K independently represents an L-lysine covalently bound to a lipophilic substituent, optionally via a spacer
  MOD_RES 20..24: note = Covalent amide linkage derived from the amino sidechain of K and the carboxy sidechain of E

SEQ ID NO: 7121-8119 - skipped (999 entries)

SEQ ID NO: 8120 - protein, 39 aa, synthetic construct; identical to SEQ ID NO: 120
  REGION 1..39: note = Description of Artificial Sequence: Synthetic polypeptide
  MOD_RES 2: note = Aib
  MOD_RES 16: note K(1-(4,4-dimethyl-2,6-dioxocyclohex-1-ylidene)-3-methylbuty l protecting group)
  SITE 16: note = K independently represents an L-lysine covalently bound to a lipophilic substituent, optionally via a spacer

SEQ ID NO: 8121-9119 - skipped (999 entries)

SEQ ID NO: 9120 - protein, 39 aa, synthetic construct; identical to SEQ ID NO: 120
  REGION 1..39: note = Description of Artificial Sequence: Synthetic polypeptide
  MOD_RES 2: note = Aib
  MOD_RES 16: note K(1-(4,4-dimethyl-2,6-dioxocyclohex-1-ylidene)-3-methylbuty l protecting group)
  MOD_RES 20: note = K(allyloxycarbonyl protecting group)
  MOD_RES 24: note = E(allyl (CH2=CH-CH2- ) protecting group)
  SITE 16: note = K independently represents an L-lysine covalently bound to a lipophilic substituent, optionally via a spacer

SEQ ID NO: 9121 - protein, 4 aa, synthetic construct
  REGION 1..4: note = Description of Artificial Sequence: Synthetic peptide
EEEE

SEQ ID NO: 9122 - protein, 4 aa, synthetic construct
  REGION 1..4: note = Description of Artificial Sequence: Synthetic peptide
  MOD_RES 1..4: note = Gamma-E
  VARIANT 1..4: note = The entire sequence of amino acids 1-4 can be repeated one to six times
EEEE

SEQ ID NO: 9123 - protein, 4 aa, synthetic construct
  REGION 1..4: note = Description of Artificial Sequence: Synthetic peptide
  MOD_RES 1..4: note = Gamma-E
EEEE

SEQ ID NO: 9124 - protein, 5 aa, synthetic construct
  REGION 1..5: note = Description of Artificial Sequence: Synthetic peptide
  MOD_RES 1..5: note = Gamma-E
EEEEE

SEQ ID NO: 9125 - protein, 4 aa, synthetic construct
  REGION 1..4: note = Description of Artificial Sequence: Synthetic peptide
  MOD_RES 1..3: note = Gamma-E
EEEG

SEQ ID NO: 9126 - protein, 5 aa, synthetic construct
  REGION 1..5: note = Description of Artificial Sequence: Synthetic peptide
  MOD_RES 2..5: note = Gamma-E
  VARIANT 2..5: note = Amino acid residues 2-5 can be repeated one to six times
GEEEE

SEQ ID NO: 9127 - protein, 5 aa, synthetic construct
  REGION 1..5: note = Description of Artificial Sequence: Synthetic peptide
  MOD_RES 1..4: note = Gamma-E
  VARIANT 1..4: note = Amino acid residues 1-4 can be repeated one to six times
EEEEG

SEQ ID NO: 9128 - protein, 7 aa, synthetic construct
  REGION 1..7: note = Description of Artificial Sequence: Synthetic peptide
  MOD_RES 2..6: note = Covalent amide linkage derived from the amino sidechain of K and the carboxy sidechain of E
AKAAREW
